(19) United States
(12) Patent Application Publication
(10) Pub. No.: US 2006/0168696 A1
(43) Pub. Date: Jul. 27, 2006

(54) Nucleotide sequences and corresponding polypeptides conferring modulated plant size and biomass and other characteristics

(75) Inventors: Kenneth Feldmann, Newbury Park, CA (US); Gregory Nadzan, Woodland Hills, CA (US); Peter Mascia, Thousand Oaks, CA (US)

Correspondence Address: BIRCH STEWART KOLASCH & BIRCH, PO BOX 747, FALLS CHURCH, VA, 22040-0747, US

(73) Assignee: CERES, INC., Thousand Oaks, CA (US)

(21) Appl. No.: 11/317,789

(22) Filed: Dec. 22, 2005

Related U.S. Application Data
(63) Continuation-in-part of application No. 11/241,673, filed on Sep. 30, 2005.
(60) Provisional application No. 60/639,228, filed on Dec. 22, 2004.

(51) Int. Cl. C07H 21/04; C12N 15/82; C12N 5/04; A01H 1/00

(52) U.S. Cl. 800/287; 800/289; 435/419; 435/468; 536/23.6

(57) ABSTRACT

The present invention relates to isolated nucleic acid molecules and their corresponding encoded polypeptides able confer the trait of modulated plant size, vegetative growth, organ number, plant architecture, sterility or seedling lethality in plants. The present invention further relates to the use of these nucleic acid molecules and polypeptides in making transgenic plants, plant cells, plant materials or seeds of a plant having such modulated growth or phenotype characteristics that are altered with respect to wild type plants grown under similar conditions.

[0001] This application is a Continuation-In-Part of co-pending application Ser. No. 11/241,673 filed on Sep. 30, 2005, the entire contents of which are hereby incorporated by reference and for which priority is claimed under 35 U.S.C. § 120. This non-provisional application claims priority under 35 U.S.C. § 119(e) on U.S. Provisional Application No. 60/639,228 filed on Dec. 22, 2004, the entire contents of which are hereby incorporated by reference.

### FIELD OF THE INVENTION

[0002] The present invention relates to isolated nucleic acid molecules and their corresponding encoded polypeptides able to modulate plant size, vegetative growth, organ number, architecture, biomass, lethality, sterility and other characteristics in plants. The present invention further relates to using the nucleic acid molecules and polypeptides to make transgenic plants, plant cells, plant materials or seeds of a plant having modulated phenotypic and growth characteristics as compared to wild-type plants grown under similar conditions.

### BACKGROUND OF THE INVENTION

[0003] Plants specifically improved for agriculture, horticulture, biomass conversion, and other industries (e.g. paper industry, plants as production factories for proteins or other compounds) can be obtained using molecular technologies. As an example, great agronomic value can result from modulating the size of a plant as a whole or of any of its organs or the number of any of its organs.

[0004] Similarly, modulation of the size and stature of an entire plant, or a particular portion of a plant, allows production of plants better suited for a particular industry. For example, reductions in the height of specific crops and tree species can be beneficial by allowing easier harvesting. Alternatively, increasing height, thickness or organ number may be beneficial by providing more biomass useful for processing into food, feed, fuels and/or chemicals (http://www.eere.energy.gov/biomass/publications.html). Other examples of commercially desirable traits include increasing the length of the floral stems of cut flowers, increasing or altering leaf size and shape or enhancing the size of seeds and/or fruits. Changes in organ size, organ number and biomass also result in changes in the mass of constituent molecules such as secondary products and convert the plants into factories for these compounds.

[0005] Availability and maintenance of a reproducible stream of food and feed to feed people has been a high priority throughout the history of human civilization and lies at the origin of agriculture. Specialists and researchers in the fields of agronomy science, agriculture, crop science, horticulture, and forest science are even today constantly striving to find and produce plants with an increased growth potential to feed an increasing world population and to guarantee a supply of reproducible raw materials. The robust level of research in these fields of science indicates the level of importance leaders in every geographic environment and climate around the world place on providing sustainable sources of food, feed and energy for the population.

[0006] Manipulation of crop performance has been accomplished conventionally for centuries through plant breeding. The breeding process is, however, both time-consuming and labor-intensive. Furthermore, appropriate breeding programs must be specially designed for each relevant plant species.

[0007] On the other hand, great progress has been made in using molecular genetics approaches to manipulate plants to provide better crops. Through introduction and expression of recombinant nucleic acid molecules in plants, researchers are now poised to provide the community with plant species tailored to grow more efficiently and produce more product despite unique geographic and/or climatic environments. These new approaches have the additional advantage of not being limited to one plant species, but instead being applicable to multiple different plant species (1).

[0008] Despite this progress, today there continues to be a great need for generally applicable processes that improve forest or agricultural plant growth to suit particular needs depending on specific environmental conditions. To this end, the present invention is directed to advantageously manipulating plant size, organ number, plant architecture and/or biomass to maximize the benefits of various crops depending on the benefit sought and the particular environment in which the crop must grow, characterized by expression of recombinant DNA molecules in plants. These molecules may be from the plant itself, and simply expressed at a higher or lower level, or the molecules may be from different plant species.

### SUMMARY OF THE INVENTION

[0009] The present invention, therefore, relates to isolated nucleic acid molecules and polypeptides and their use in making transgenic plants, plant cells, plant materials or seeds of plants having life cycles, particularly plant size, vegetative growth, organ number, plant architecture, biomass, lethality, sterility and other characteristics that are altered with respect to wild-type plants grown under similar or identical conditions (sometimes hereinafter collectively referred to as “modulated growth and phenotype characteristics”).

[0010] Unless otherwise defined, all technical and scientific terms used herein have the same meaning as commonly understood by one of ordinary skill in the art to which this invention belongs.

### BRIEF DESCRIPTION OF THE FIGURES

[0011] FIGS. 1-73: The Figures set forth amino acid sequence alignment showing homologues of Lead polypeptide sequences, SEQ ID NO. ***. Conserved regions are enclosed in a box. A consensus sequence is shown below the alignment.

### DETAILED DESCRIPTION OF THE INVENTION

1. The Invention

[0012] The invention of the present application may be described by, but not necessarily limited to, the following exemplary embodiments.

[0013] The present invention discloses novel isolated nucleic acid molecules, nucleic acid molecules that interfere with these nucleic acid molecules, nucleic acid molecules that hybridize to these nucleic acid molecules, and isolated nucleic acid molecules that encode the same protein due to the degeneracy of the DNA code. Additional embodiments of the present application further include the polypeptides encoded by the isolated nucleic acid molecules of the present invention.

[0014] More particularly, the nucleic acid molecules of the present invention comprise: (a) a nucleotide sequence encoding an amino acid sequence that is at least 85% identical to any one of the polypeptides in the sequence listing or in the Alignment Tables of FIGS. 1-73 (SEQ ID Nos. ***), (b) a nucleotide sequence that is complementary to any one of the nucleotide sequences according to (a), (c) a nucleotide sequence according to any one of the nucleotides in the sequence listing SEQ ID Nos. ***, (d) a nucleotide sequence that is in reverse order of any one of the nucleotide sequences according to (c) when read in the 5′ to 3′ direction, (e) a nucleotide sequence able to interfere with any one of the nucleotide sequences according to (a), (f) a nucleotide sequence able to form a hybridized nucleic acid duplex with the nucleic acid according to any one of paragraphs (a)-(e) at a temperature from about 40° C. to about 48° C. below a melting temperature of the hybridized nucleic acid duplex, and (g) a nucleotide sequence encoding any one of amino acid sequences in the sequence listing or the alignment tables in FIGS. 1-73, corresponding to SEQ ID Nos. **-**

[0015] Additional embodiments of the present invention include those polypeptide and nucleic acid molecule sequences disclosed in SEQ ID NOS: **-**

[0016] The present invention further embodies a vector comprising a first nucleic acid having a nucleotide sequence encoding a plant transcription and/or translation signal, and a second nucleic acid having a nucleotide sequence according to the isolated nucleic acid molecules of the present invention. More particularly, the first and second nucleic acids may be operably linked. Even more particularly, the second nucleic acid may be endogenous to a first organism, and any other nucleic acid in the vector may be endogenous to a second organism. Most particularly, the first and second organisms may be different species.

[0017] In a further embodiment of the present invention, a host cell may comprise an isolated nucleic acid molecule according to the present invention. More particularly, the isolated nucleic acid molecule of the present invention found in the host cell of the present invention may be endogenous to a first organism and may be flanked by nucleotide sequences endogenous to a second organism. Further, the first and second organisms may be different species. Even more particularly, the host cell of the present invention may comprise a vector according to the present invention, which itself comprises nucleic acid molecules according to those of the present invention.

[0018] In another embodiment of the present invention, the isolated polypeptides of the present invention may additionally comprise amino acid sequences that are at least 85% identical to any one of the polypeptides in the sequence listing or in FIGS. 1-73 (SEQ ID Nos. **-**).

[0019] Other embodiments of the present invention include methods of introducing an isolated nucleic acid of the present invention into a host cell. More particularly, an isolated nucleic acid molecule of the present invention may be contacted to a host cell under conditions allowing transport of the isolated nucleic acid into the host cell. Even more particularly, a vector as described in a previous embodiment of the present invention, may be introduced into a host cell by the same method.

[0020] Methods of detection are also available as embodiments of the present invention. Particularly, methods for detecting a nucleic acid molecule according to the present invention in a sample. More particularly, the isolated nucleic acid molecule according to the present invention may be contacted with a sample under conditions that permit a comparison of the nucleotide sequence of the isolated nucleic acid molecule with a nucleotide sequence of nucleic acid in the sample. The results of such an analysis may then be considered to determine whether the isolated nucleic acid molecule of the present invention is detectable and therefore present within the sample.

[0021] A further embodiment of the present invention comprises a plant, plant cell, plant material or seeds of plants comprising an isolated nucleic acid molecule and/or vector of the present invention. More particularly, the isolated nucleic acid molecule of the present invention may be exogenous to the plant, plant cell, plant material or seed of a plant.

[0022] A further embodiment of the present invention includes a plant regenerated from a plant cell or seed according to the present invention. More particularly, the plant, or plants derived from the plant, plant cell, plant material or seeds of a plant of the present invention preferably has increased size (in whole or in part), increased vegetative growth, increased organ number and/or increased biomass (sometimes hereinafter collectively referred to as increased biomass), lethality, sterility or ornamental characteristics as compared to a wild-type plant cultivated under identical conditions. Furthermore, the transgenic plant may comprise a first isolated nucleic acid molecule of the present invention, which encodes a protein involved in modulating growth and phenotype characteristics, and a second isolated nucleic acid molecule which encodes a promoter capable of driving expression in plants, wherein the growth and phenotype modulating component and the promoter are operably linked. More preferably, the first isolated nucleic acid may be mis-expressed in the transgenic plant of the present invention, and the transgenic plant exhibits modulated characteristics as compared to a progenitor plant devoid of the gene, when the transgenic plant and the progenitor plant are cultivated under identical environmental conditions. In another embodiment of the present invention the modulated growth and phenotype characteristics may be due to the inactivation of a particular sequence, using for example an interfering RNA.

[0023] A further embodiment consists of a plant, plant cell, plant material or seed of a plant according to the present invention which comprises an isolated nucleic acid molecule of the present invention, wherein the plant, or plants derived from the plant, plant cell, plant material or seed of a plant, has the modulated growth and phenotype characteristics as compared to a wild-type plant cultivated under identical conditions.

[0024] Another embodiment of the present invention includes methods of modulating growth and phenotype characteristics in plants. More particularly, these methods comprise transforming a plant with an isolated nucleic acid molecule according to the present invention.

[0025] In yet another embodiment, lethality genes of the invention can be used to control transmission and expression of transgenic traits, thereby facilitating the cultivation of transgenic plants without the undesired transmission of transgenic traits to other plants. Such lethality genes can be also be utilized for selective lethality, by combining the lethal gene with appropriate promoter elements for selective expression, to thereby cause lethality of only certain cells or only under certain conditions.

[0026] Polypeptides of the present invention include consensus sequences. The consensus sequences are those as shown in FIGS. 1-73.

2. Definitions

[0027] The following terms are utilized throughout this application:

[0028] Biomass: As used herein, “biomass” refers to useful biological material including a product of interest, which material is to be collected and is intended for further processing to isolate or concentrate the product of interest. “Biomass” may comprise the fruit or parts of it or seeds, leaves, or stems or roots where these are the parts of the plant that are of particular interest for the industrial purpose. “Biomass”, as it refers to plant material, includes any structure or structures of a plant that contain or represent the product of interest.

[0029] Transformation: Examples of means by which this can be accomplished are described below and include Agrobacterium-mediated transformation (of dicots (9-10), of monocots (11-13), and biolistic methods (14)), electroporation, in planta techniques, and the like. Such a plant containing the exogenous nucleic acid is referred to here as a T₀ for the primary transgenic plant and T₁ for the first generation.

[0030] Functionally Comparable Proteins or Functional Homologs: This term describes those proteins that have at least one functional characteristic in common. Such characteristics include sequence similarity, biochemical activity, transcriptional pattern similarity and phenotypic activity. Typically, the functionally comparable proteins share some sequence similarity or at least one biochemical. Within this definition, analogs are considered to be functionally comparable. In addition, functionally comparable proteins generally share at least one biochemical and/or phenotypic activity.

[0031] Functionally comparable proteins will give rise to the same characteristic to a similar, but not necessarily the same, degree. Typically, comparable proteins give the same characteristics where the quantitative measurement due to one of the comparables is at least 20% of the other; more typically, between 30 to 40%; even more typically, between 50-60%; even more typically between 70 to 80%; even more typically between 90 to 100% of the other.

[0032] Heterologous sequences: “Heterologous sequences” are those that are not operatively linked or are not contiguous to each other in nature. For example, a promoter from corn is considered heterologous to an Arabidopsis coding region sequence. Also, a promoter from a gene encoding a growth factor from corn is considered heterologous to a sequence encoding the corn receptor for the growth factor. Regulatory element sequences, such as UTRs or 3′ end termination sequences that do not originate in nature from the same gene as the coding sequence, are considered heterologous to said coding sequence. Elements operatively linked in nature and contiguous to each other are not heterologous to each other. On the other hand, these same elements remain operatively linked but become heterologous if other filler sequence is placed between them. Thus, the promoter and coding sequences of a corn gene expressing an amino acid transporter are not heterologous to each other, but the promoter and coding sequence of a corn gene operatively linked in a novel manner are heterologous.

[0033] Misexpression: The term “misexpression” refers to an increase or a decrease in the transcription of a coding region into a complementary RNA sequence as compared to the wild-type. This term also encompasses expression and/or translation of a gene or coding region or inhibition of such transcription and/or translation for a different time period as compared to the wild-type and/or from a non-natural location within the plant genome, including a gene coding region from a different plant species or from a non-plant organism.

[0034] Percentage of sequence identity: As used herein, the term “percent sequence identity” refers to the degree of identity between any given query sequence and a subject sequence. A query nucleic acid or amino acid sequence is aligned to one or more subject nucleic acid or amino acid sequences using the computer program ClustalW (version 1.83, default parameters), which allows alignments of nucleic acid or protein sequences to be carried out across their entire length (global alignment).

[0035] ClustalW calculates the best match between a query and one or more subject sequences, and aligns them so that identities, similarities and differences can be determined. Gaps of one or more residues can be inserted into a query sequence, a subject sequence, or both, to maximize sequence alignments. For fast pairwise alignment of nucleic acid sequences, the following default parameters are used: word size: 2; window size: 4; scoring method: percentage; number of top diagonals: 4; and gap penalty: 5. For multiple alignment of nucleic acid sequences, the following parameters are used: gap opening penalty: 10.0; gap extension penalty: 5.0; and weight transitions: yes. For fast pairwise alignment of protein sequences, the following parameters are used: word size: 1; window size: 5; scoring method: percentage; number of top diagonals: 5; gap penalty: 3. For multiple alignment of protein sequences, the following parameters are used: weight matrix: blosum; gap opening penalty: 10.0; gap extension penalty: 0.05; hydrophilic gaps: on; hydrophilic residues: Gly, Pro, Ser, Asn, Asp, Gln, Glu, Arg, and Lys; residue-specific gap penalties: on. The output is a sequence alignment that reflects the relationship between sequences. ClustalW can be run, for example, at the Baylor College of Medicine Search Launcher site (searchlauncher.bcm.trnc.edu/multi-align/multi-align.html) and at the European Bioinformatics Institute site on the World Wide Web (ebi.ac.uk/clustalw).

[0036] In case of the functional homolog searches, to ensure a subject sequence having the same function as the query sequence, the alignment has to be along at least 80% of the length of the query sequence so that the majority of the query sequence is covered by the subject sequence. To determine a percent identity between a query sequence and a subject sequence, ClustalW divides the number of identities in the best alignment by the number of residues compared (gap positions are excluded), and multiplies the result by 100. The output is the percent identity of the subject sequence with respect to the query sequence. It is noted that the percent identity value can be rounded to the nearest tenth. For example, 78.11, 78.12, 78.13, and 78.14 are rounded down to 78.1, while 78.15, 78.16, 78.17, 78.18, and 78.19 are rounded up to 78.2.

[0037] Regulatory Regions: The term “regulatory region” refers to nucleotide sequences that, when operably linked to a sequence, influence transcription initiation or translation initiation or transcription termination of said sequence and the rate of said processes, and/or stability and/or mobility of a transcription or translation product. As used herein, the term “operably linked” refers to positioning of a regulatory region and said sequence to enable said influence. Regulatory regions include, without limitation, promoter sequences, enhancer sequences, response elements, protein recognition sites, inducible elements, protein binding sequences, 5′ and 3′ untranslated regions (UTRs), transcriptional start sites, termination sequences, polyadenylation sequences, and introns. Regulatory regions can be classified in two categories, promoters and other regulatory regions.

[0038] Stringency: “Stringency,” as used herein is a function of nucleic acid molecule probe length, nucleic acid molecule probe composition (G+C content), salt concentration, organic solvent concentration and temperature of hybridization and/or wash conditions. Stringency is typically measured by the parameter Tₘ, which is the temperature at which 50% of the complementary nucleic acid molecules in the hybridization assay are hybridized, in terms of a temperature differential from Tₘ. High stringency conditions are those providing a condition of Tₘ-5° C. to Tₘ-10° C. Medium or moderate stringency conditions are those providing Tₘ-20° C. to Tₘ-29° C. Low stringency conditions are those providing a condition of Tₘ-40° C. to Tₘ-48° C. The relationship between hybridization conditions and Tₘ (in ° C.) is expressed in the mathematical equation:
Tₘ=81.5−16.6(log₁₀[Na⁺])+0.41(%G+C)−(600/N) (I)
where N is the number of nucleotides of the nucleic acid molecule probe. This equation works well for probes 14 to 70 nucleotides in length that are identical to the target sequence. The equation below, for Tₘ of DNA-DNA hybrids, is useful for probes having lengths in the range of 50 to greater than 500 nucleotides, and for conditions that include an organic solvent (form amide):
Tₘ=81.5+16.6 log {[Na⁺]/(1+0.7[Na⁺])}+0.41(%G+C)−500/L 0.63(%formamide) (II)
where L represents the number of nucleotides in the probe in the hybrid (21). The Tₘ of Equation II is affected by the nature of the hybrid: for DNA-RNA hybrids, Tₘ is 10-15° C. higher than calculated; for RNA-RNA hybrids, Tₘ is 20-25° C. higher. Because the Tₘ decreases about 1° C. for each 1% decrease in homology when a long probe is used (22), stringency conditions can be adjusted to favor detection of identical genes or related family members.

[0039] Equation II is derived assuming the reaction is at equilibrium. Therefore, hybridizations according to the present invention are most preferably performed under conditions of probe excess and allowing sufficient time to achieve equilibrium. The time required to reach equilibrium can be shortened by using a hybridization buffer that includes a hybridization accelerator such as dextran sulfate or another high volume polymer.

[0040] Stringency can be controlled during the hybridization reaction, or after hybridization has occurred, by altering the salt and temperature conditions of the wash solutions. The formulas shown above are equally valid when used to compute the stringency of a wash solution. Preferred wash solution stringencies lie within the ranges stated above; high stringency is 5-8° C. below Tₘ medium or moderate stringency is 26-29° C. below Tₘ and low stringency is 45-48° C. below Tₘ.

[0041] T₀: The term “T₀” refers to the whole plant, explant or callus tissue, inoculated with the transformation medium.

[0042] T₁: The term T₁ refers to either the progeny of the T₀ plant, in the case of whole-plant transformation, or the regenerated seedling in the case of explant or callous tissue transformation.

[0043] T₂: The term T₂ refers to the progeny of the T₁ plant. T₂ progeny are the result of self-fertilization or cross-pollination of a T₁ plant.

[0044] T₃: The term T₃ refers to second generation progeny of the plant that is the direct result of a transformation experiment. T₃ progeny are the result of self-fertilization or cross-pollination of a T₂ plant.

[0045] 3. Important Characteristics of the Polynucleotides and Polypeptides of the Invention

[0046] The nucleic acid molecules and polypeptides of the present invention are of interest because when the nucleic acid molecules are mis-expressed (i.e., when expressed at a non-natural location or in an increased or decreased amount relative to wild-type) they produce plants that exhibit modulated growth and phenotype characteristics as compared to wild-type plants, as evidenced by the results of various experiments disclosed below. This trait can be used to exploit or maximize plant products. For example, the nucleic acid molecules and polypeptides of the present invention are used to increase the expression of genes that cause the plant to have modulated growth and phenotype characteristics.

[0047] Because some of the disclosed sequences and methods increase vegetative growth, the disclosed methods can be used to enhance biomass production. For example, plants that grow vegetatively have an increase biomass production, compared to a plant of the same species that is not genetically modified for substantial vegetative growth. Examples of increases in biomass production include increases of at least 5%, at least 10%, at least 20%, or even at least 50%, when compared to an amount of biomass production by a plant of the same species not growing vegetatively.

[0048] The life cycle of flowering plants in general can be divided into three growth phases: vegetative, inflorescence, and floral (late inflorescence phase). In the vegetative phase, the shoot apical meristem (SAM) generates leaves that later will ensure the resources necessary to produce fertile offspring. Upon receiving the appropriate environmental and developmental signals the plant switches to floral, or reproductive, growth and the SAM enters the inflorescence phase (I) and gives rise to an inflorescence with flower primordia. During this phase the fate of the SAM and the secondary shoots that arise in the axils of the leaves is determined by a set of meristem identity genes, some of which prevent and some of which promote the development of floral meristems. Once established, the plant enters the late inflorescence phase (12) where the floral organs are produced. If the appropriate environmental and developmental signals the plant switches to floral, or reproductive, growth are disrupted, the plant will not be able to enter reproductive growth, therefore maintaining vegetative growth.

[0049] As more and more transgenic plants are developed and introduced into the environment, it can be important to control the undesired spread of the transgenic triat(s) from transgenic plants to other traditional and transgenic cultivars, plant species and breeding lines, thereby preventing cross-contamination. The use of a conditionally lethal gene, i.e. one which results in plant cell death under certain conditions, has been suggested as a means to selectively kill plant cells containing a recombinent DNA (see e.g., WO 94/03619 and US patent publication 20050044596A1). The use of genes to control transmission and expression of transgenic traits is also described in U.S. application Ser. No. 10/667,295, filed on Sep. 17, 2003, which is hereby incorporated by reference. Some of the nucleotides of the invention are lethal genes, and can therefore be used as conditionally lethal genes, namely genes to be expressed in response to specific conditions, or in specific plant cells. For example, a gene that encodes a lethal trait can be placed under that control of a tissue specific promoter, or under the control of a promoter that is induced in response to specific conditions, for example, a specific chemical trigger, or specific environmental conditions.

[0050] Male or female sterile genes can also be used to control the spread of certain germplasm, such as by selective destruction of tissue, such as of the tapetum by fusing such a gene to a tapetum-specific promoter such as, TA29. Further examples of such promoters are described below.

4. The Genes of the Invention

[0051] The polynucleotides of the present invention and the proteins expressed via translation of these polynucleotides are set forth in the Sequence Listing, specifically SEQ ID Nos. 1-**. The Sequence Listing consists of functionally comparable proteins. Polypeptides comprised of a sequence within and defined by one of the consensus sequences in FIGS. 1-73 can be utilized for the purposes of the invention, namely to make transgenic plants with modulated growth and phenotype characteristics, including ornamental characteristics.

[0052] 5. Use of the Genes to Make Transgenic Plants

[0053] To use the sequences of the present invention or a combination of them or parts and/or mutants and/or fusions and/or variants of them, recombinant DNA constructs are prepared that comprise the polynucleotide sequences of the invention inserted into a vector and that are suitable for transformation of plant cells. The construct can be made using standard recombinant DNA techniques (see, 16) and can be introduced into the plant species of interest by, for example, Agrobacterium-mediated transformation, or by other means of transformation, for example, as disclosed below.

[0054] The vector backbone may be any of those typically used in the field such as plasmids, viruses, artificial chromosomes, BACs, YACs, PACs and vectors such as, for instance, bacteria-yeast shuttle vectors, lamda phage vectors, T-DNA fusion vectors and plasmid vectors (see, 17-24).

[0055] Typically, the construct comprises a vector containing a nucleic acid molecule of the present invention with any desired transcriptional and/or translational regulatory sequences such as, for example, promoters, UTRs, and 3′ end termination sequences. Vectors may also include, for example, origins of replication, scaffold attachment regions (SARs), markers, homologous sequences, and introns. The vector may also comprise a marker gene that confers a selectable phenotype on plant cells. The marker may preferably encode a biocide resistance trait, particularly antibiotic resistance, such as resistance to, for example, kanamycin, bleomycin, or hygromycin, or herbicide resistance, such as resistance to, for example, glyphosate, chlorosulfuron or phosphinotricin.

[0056] It will be understood that more than one regulatory region may be present in a recombinant polynucleotide, e.g., introns, enhancers, upstream activation regions, transcription terminators, and inducible elements. Thus, more than one regulatory region can be operably linked to said sequence.

[0057] To “operably link” a promoter sequence to a sequence, the translation initiation site of the translational reading frame of said sequence is typically positioned between one and about fifty nucleotides downstream of the promoter. A promoter can, however, be positioned as much as about 5,000 nucleotides upstream of the translation initiation site, or about 2,000 nucleotides upstream of the transcription start site. A promoter typically comprises at least a core (basal) promoter. A promoter also may include at least one control element, such as an enhancer sequence, an upstream element or an upstream activation region (UAR). For example, a suitable enhancer is a cis-regulatory element (−212 to −154) from the upstream region of the octopine synthase (ocs) gene. Fromm et al., The Plant Cell 1:977-984 (1989).

[0058] A basal promoter is the minimal sequence necessary for assembly of a transcription complex required for transcription initiation. Basal promoters frequently include a “TATA box” element that may be located between about 15 and about 35 nucleotides upstream from the site of transcription initiation. Basal promoters also may include a “CCAAT box” element (typically the sequence CCAAT) and/or a GGGCG sequence, which can be located between about 40 and about 200 nucleotides, typically about 60 to about 120 nucleotides, upstream from the transcription start site.

[0059] The choice of promoters to be included depends upon several factors, including, but not limited to, efficiency, selectability, inducibility, desired expression level, and cell- or tissue-preferential expression. It is a routine matter for one of skill in the art to modulate the expression of a sequence by appropriately selecting and positioning promoters and other regulatory regions relative to said sequence.

[0060] Some suitable promoters initiate transcription only, or predominantly, in certain cell types. For example, a promoter that is active predominantly in a reproductive tissue (e.g., fruit, ovule, pollen, pistils, female gametophyte, egg cell, central cell, nucellus, suspensor, synergid cell, flowers, embryonic tissue, embryo sac, embryo, zygote, endosperm, integument, or seed coat) can be used. Thus, as used herein a cell type- or tissue-preferential promoter is one that drives expression preferentially in the target tissue, but may also lead to some expression in other cell types or tissues as well. Methods for identifying and characterizing promoter regions in plant genomic DNA include, for example, those described in the following references: Jordano, et al., Plant Cell, 1:855-866 (1989); Bustos, et al., Plant Cell, 1:839-854 (1989); Green, et al., EMBO J. 7, 4035-4044 (1988); Meier, et al., Plant Cell, 3, 309-316 (1991); and Zhang, et al., Plant Physiology 110: 1069-1079 (1996).

[0061] Examples of various classes of promoters are described below. Some of the promoters indicated below are described in more detail in U.S. Patent Application Ser. Nos. 60/505,689; 60/518,075; 60/544,771; 60/558,869; 60/583,691; 60/619,181; 60/637,140; 10/950,321; 10/957,569; 11/058,689; 11/172,703; 11/208,308; and PCT/US05/23639. It will be appreciated that a promoter may meet criteria for one classification based on its activity in one plant species, and yet meet criteria for a different classification based on its activity in another plant species.

[0062] Other Regulatory Regions: A 5′ untranslated region (UTR) can be included in nucleic acid constructs described herein. A 5′ UTR is transcribed, but is not translated, and lies between the start site of the transcript and the translation initiation codon and may include the +1 nucleotide. A 3′ UTR can be positioned between the translation termination codon and the end of the transcript. UTRs can have particular functions such as increasing mRNA stability or attenuating translation. Examples of 3′ UTRs include, but are not limited to, polyadenylation signals and transcription termination sequences, e.g., a nopaline synthase termination sequence.

[0063] Various promoters can be used to drive expression of the genes of the present invention. Nucleotide sequences of such promoters are set forth in SEQ ID NOs: **-**. Some of them can be broadly expressing promoters, others may be more tissue preferential.

[0064] A promoter can be said to be “broadly expressing” when it promotes transcription in many, but not necessarily all, plant tissues or plant cells. For example, a broadly expressing promoter can promote transcription of an operably linked sequence in one or more of the shoot, shoot tip (apex), and leaves, but weakly or not at all in tissues such as roots or stems. As another example, a broadly expressing promoter can promote transcription of an operably linked sequence in one or more of the stem, shoot, shoot tip (apex), and leaves, but can promote transcription weakly or not at all in tissues such as reproductive tissues of flowers and developing seeds. Non-limiting examples of broadly expressing promoters that can be included in the nucleic acid constructs provided herein include the p326 (SEQ ID NO:), YP0144 (SEQ ID NO:), YP0190 (SEQ ID NO:), p13879 (SEQ ID NO:), YP0050 (SEQ ID NO:), p32449 (SEQ ID NO:), 21876 (SEQ ID NO:), YP0158 (SEQ ID NO:), YP0214 (SEQ ID NO:), YP0380 (SEQ ID NO:), PT0848 (SEQ ID NO:), and PTO633 (SEQ ID NO:). Additional examples include the cauliflower mosaic virus (CaMV) 35S promoter, the mannopine synthase (MAS) promoter, the 1′ or 2′ promoters derived from T-DNA of Agrobacterium tumefaciens, the figwort mosaic virus 34S promoter, actin promoters such as the rice actin promoter, and ubiquitin promoters such as the maize ubiquitin-1 promoter. In some cases, the CaMV ³⁵S promoter is excluded from the category of broadly expressing promoters.

[0065] Root-active promoters drive transcription in root tissue, e.g., root endodermis, root epidermis, or root vascular tissues. In some embodiments, root-active promoters are root-preferential promoters, i.e., drive transcription only or predominantly in root tissue. Root-preferential promoters include the YP0128 (SEQ ID NO: **), YP0275 (SEQ ID NO: **), PT0625 (SEQ ID NO: **), PT0660 (SEQ ID NO: **), PT0683 (SEQ ID NO: **), and PT0758 (SEQ ID NO: **). Other root-preferential promoters include the PT0613 (SEQ ID NO: **), PT0672 (SEQ ID NO: **), PT0688 (SEQ ID NO: **), and PT0837 (SEQ ID NO: **), which drive transcription primarily in root tissue and to a lesser extent in ovules and/or seeds. Other examples of root-preferential promoters include the root-specific subdomains of the CaMV 35S promoter (Lam et al., Proc. Natl. Acad. Sci. USA 86:7890-7894 (1989)), root cell specific promoters reported by Conkling et al., Plant Physiol. 93:1203-1211 (1990), and the tobacco RD2 gene promoter.

[0066] In some embodiments, promoters that drive transcription in maturing endosperm can be useful. Transcription from a maturing endosperm promoter typically begins after fertilization and occurs primarily in endosperm tissue during seed development and is typically highest during the cellularization phase. Most suitable are promoters that are active predominantly in maturing endosperm, although promoters that are also active in other tissues can sometimes be used. Non-limiting examples of maturing endosperm promoters that can be included in the nucleic acid constructs provided herein include the napin promoter, the Arcelin-5 promoter, the phaseolin gene promoter (Bustos et al., Plant Cell 1(9):839-853 (1989)), the soybean trypsin inhibitor promoter (Riggs et al., Plant Cell 1(6):609-621 (1989)), the ACP promoter (Baerson et al., Plant Mol Biol, 22(2):255-267 (1993)), the stearoyl-ACP desaturase gene (Slocombe et al., Plant Physiol 104(4):167-176 (1994)), the soybean α′ subunit of β-conglycinin promoter (Chen et al., Proc Natl Acad Sci USA 83:8560-8564 (1986)), the oleosin promoter (Hong et al., Plant Mol Biol 34(3):549-555 (1997)), and zein promoters, such as the 15 kD zein promoter, the 16 kD zein promoter, 19 kD zein promoter, 22 kD zein promoter and 27 kD zein promoter. Also suitable are the Osgt-1 promoter from the rice glutelin-1 gene (Zheng et al., Mol. Cell Biol. 13:5829-5842 (1993)), the beta-amylase gene promoter, and the barley hordein gene promoter. Other maturing endosperm promoters include the YP0092 (SEQ ID NO: **), PT0676 (SEQ ID NO: **), and PT0708 (SEQ ID NO: **).

[0067] Promoters that drive transcription in ovary tissues such as the ovule wall and mesocarp can also be useful, e.g., a polygalacturonidase promoter, the banana TRX promoter, and the melon actin promoter. Other such promoters that drive gene expression preferentially in ovules are YP0007 (SEQ ID NO: **), YP0111 (SEQ ID NO: **), YP0092 (SEQ ID NO: **), YP0103 (SEQ ID NO: **), YP0028 (SEQ ID NO: **), YP0121 (SEQ ID NO: **), YP0008 (SEQ ID NO: **), YP0039 (SEQ ID NO: **), YP0115 (SEQ ID NO: **), YP0119 (SEQ ID NO: **), YP0120 (SEQ ID NO: **) and YP0374 (SEQ ID NO: **).

[0068] In some other embodiments of the present invention, embryo sac/early endosperm promoters can be used in order drive transcription of the sequence of interest in polar nuclei and/or the central cell, or in precursors to polar nuclei, but not in egg cells or precursors to egg cells. Most suitable are promoters that drive expression only or predominantly in polar nuclei or precursors thereto and/or the central cell. A pattern of transcription that extends from polar nuclei into early endosperm development can also be found with embryo sac/early endosperm-preferential promoters, although transcription typically decreases significantly in later endosperm development during and after the cellularization phase. Expression in the zygote or developing embryo typically is not present with embryo sac/early endosperm promoters.

[0069] Promoters that may be suitable include those derived from the following genes: Arabidopsis viviparous-1 (see, GenBank No. U93215); Arabidopsis atmycl (see, Urao (1996) Plant Mol. Biol., 32:571-57; Conceicao (1994) Plant, 5:493-505); Arabidopsis FIE (GenBank No. AF129516); Arabidopsis MEA; Arabidopsis FIS2 (GenBank No. AF096096); and FIE 1.1 (U.S. Pat. No. 6,906,244). Other promoters that may be suitable include those derived from the following genes: maize MAC1 (see, Sheridan (1996) Genetics, 142:1009-1020); maize Cat3 (see, GenBank No. L05934; Abler (1993) Plant Mol. Biol., 22:10131-1038). Other promoters include the following Arabidopsis promoters: YP0039 (SEQ ID NO: 64), YP0101 (SEQ ID NO: 71), YP0102 (SEQ ID NO: 72), YP0110 (SEQ ID NO: 75), YP0117 (SEQ ID NO: 78), YP0119 (SEQ ID NO: 79), YP0137 (SEQ ID NO: 83), DME, YP0285 (SEQ ID NO: 94), and YP0212 (SEQ ID NO: 90). Other promoters that may be useful include the following rice promoters: p530c10, pOsFIE2-2, pOsMEA, pOsYp102, and pOsYp285.

[0070] Promoters that preferentially drive transcription in zygotic cells following fertilization can provide embryo-preferential expression and may be useful for the present invention. Most suitable are promoters that preferentially drive transcription in early stage embryos prior to the heart stage, but expression in late stage and maturing embryos is also suitable. Embryo-preferential promoters include the barley lipid transfer protein (Ltp1) promoter (Plant Cell Rep (2001) 20:647-654, YP0097 (SEQ ID NO: **), YP0107 (SEQ ID NO: **), YP0088 (SEQ ID NO: **), YP0143 (SEQ ID NO: **), YP0156 (SEQ ID NO: **), PT0650 (SEQ ID NO: **), PT0695 (SEQ ID NO: **), PT0723 (SEQ ID NO: **), PT0838 (SEQ ID NO: **), PT0879 (SEQ ID NO: **) and PT0740 (SEQ ID NO: **).

[0071] Promoters active in photosynthetic tissue in order to drive transcription in green tissues such as leaves and stems are of particular interest for the present invention. Most suitable are promoters that drive expression only or predominantly such tissues. Examples of such promoters include the ribulose-1,5-bisphosphate carboxylase (RbcS) promoters such as the RbcS promoter from eastern larch (Larix laricina), the pine cab6 promoter (Yamamoto et al., Plant Cell Physiol. 35:773-778 (1994)), the Cab-1 gene promoter from wheat (Fejes et al., Plant Mol. Biol. 15:921-932 (1990)), the CAB-1 promoter from spinach (Lubberstedt et al., Plant Physiol. 104:997-1006 (1994)), the cab1R promoter from rice (Luan et al., Plant Cell 4:971-981 (1992)), the pyruvate orthophosphate dikinase (PPDK) promoter from corn (Matsuoka et al., Proc Natl Acad. Sci USA 90:9586-9590 (1993)), the tobacco Lhcb1*2 promoter (Cerdan et al., Plant Mol. Biol. 33:245-255 (1997)), the Arabidopsis thaliana SUC2 sucrose-H+ symporter promoter (Truernit et al., Planta 196:564-570 (1995)), and thylakoid membrane protein promoters from spinach (psaD, psaF, psaE, PC, FNR, atpC, atpD, cab, rbcS. Other promoters that drive transcription in stems, leafs and green tissue are PT0535 (SEQ ID NO: **), PT0668 (SEQ ID NO: **), PT0886 (SEQ ID NO: **), PR0924 (SEQ ID NO: **), YP0144 (SEQ ID NO: **), YP0380 (SEQ ID NO: **) and PT0585 (SEQ ID NO: **).

[0072] In some other embodiments of the present invention, inducible promoters may be desired. Inducible promoters drive transcription in response to external stimuli such as chemical agents or environmental stimuli. For example, inducible promoters can confer transcription in response to hormones such as giberellic acid or ethylene, or in response to light or drought. Examples of drought inedible promoters are YP0380 (SEQ ID NO: **), PT0848 (SEQ ID NO: **), YP0381 (SEQ ID NO: **), YP0337 (SEQ ID NO: **), YP0337 (SEQ ID NO: **), PT0633 (SEQ ID NO: **), YP0374 (SEQ ID NO: **), PT0710 (SEQ ID NO: **), YP0356 (SEQ ID NO: **), YP0385 (SEQ ID NO: **), YP0396 (SEQ ID NO: **), YP0384 (SEQ ID NO: **), YP0384 (SEQ ID NO: **), PT0688 (SEQ ID NO: **), YP0286 (SEQ ID NO: **), YP0377 (SEQ ID NO: **), and PD1367 (SEQ ID NO: **). Examples of promoters induced by nitrogen are PT0863 (SEQ ID NO: **), PT0829 (SEQ ID NO: **), PT0665 (SEQ ID NO: **) and PT0886 (SEQ ID NO: **). An example of a shade inducible promoter is PR0924.

[0073] Other Promoters: Other classes of promoters include, but are not limited to, leaf-preferential, stem/shoot-preferential, callus-preferential, guard cell-preferential, such as PT0678 (SEQ ID NO: **), and senescence-preferential promoters. Promoters designated YP0086 (SEQ ID NO: **), YP0188 (SEQ ID NO: **), YP0263 (SEQ ID NO: **), PT0758 (SEQ ID NO: **), PT0743 (SEQ ID NO: **), PT0829 (SEQ ID NO: **), YP0119 (SEQ ID NO: **), and YP0096 (SEQ ID NO: **), as described in the above-referenced patent applications, may also be useful.

[0074] Alternatively, misexpression can be accomplished using a two component system, whereby the first component consists of a transgenic plant comprising a transcriptional activator operatively linked to a promoter and the second component consists of a transgenic plant that comprise a nucleic acid molecule of the invention operatively linked to the target-binding sequence/region of the transcriptional activator. The two transgenic plants are crossed and the nucleic acid molecule of the invention is expressed in the progeny of the plant. In another alternative embodiment of the present invention, the misexpression can be accomplished by having the sequences of the two component system transformed in one transgenic plant line.

[0075] Another alternative consists in inhibiting expression of a growth or phenotype-modulating polypeptide in a plant species of interest. The term “expression” refers to the process of converting genetic information encoded in a polynucleotide into RNA through transcription of the polynucleotide (i.e., via the enzymatic action of an RNA polymerase), and into protein, through translation of mRNA. “Up-regulation” or “activation” refers to regulation that increases the production of expression products relative to basal or native states, while “down-regulation” or “repression” refers to regulation that decreases production relative to basal or native states.

[0076] A number of nucleic-acid based methods, including anti-sense RNA, ribozyme directed RNA cleavage, and interfering RNA (RNAi) can be used to inhibit protein expression in plants. Antisense technology is one well-known method. In this method, a nucleic acid segment from the endogenous gene is cloned and operably linked to a promoter so that the antisense strand of RNA is transcribed. The recombinant vector is then transformed into plants, as described above, and the antisense strand of RNA is produced. The nucleic acid segment need not be the entire sequence of the endogenous gene to be repressed, but typically will be substantially identical to at least a portion of the endogenous gene to be repressed. Generally, higher homology can be used to compensate for the use of a shorter sequence. Typically, a sequence of at least 30 nucleotides is used (e.g., at least 40, 50, 80, 100, 200, 500 nucleotides or more).

[0077] Thus, for example, an isolated nucleic acid provided herein can be an antisense nucleic acid to one of the aforementioned nucleic acids encoding a biomass-modulating polypeptide. A nucleic acid that decreases the level of a transcription or translation product of a gene encoding a growth or phenotype-modulating polypeptide is transcribed into an antisense nucleic acid similar or identical to the sense coding sequence of the growth or phenotype-modulating polypeptide. Alternatively, the transcription product of an isolated nucleic acid can be similar or identical to the sense coding sequence of a growth or phenotype-modulating polypeptide, but is an RNA that is unpolyadenylated, lacks a 5′ cap structure, or contains an unsplicable intron.

[0078] In another method, a nucleic acid can be transcribed into a ribozyme, or catalytic RNA, that affects expression of an mRNA. (See, U.S. Pat. No. 6,423,885). Ribozymes can be designed to specifically pair with virtually any target RNA and cleave the phosphodiester backbone at a specific location, thereby functionally inactivating the target RNA. Heterologous nucleic acids can encode ribozymes designed to cleave particular mRNA transcripts, thus preventing expression of a polypeptide. Hammerhead ribozymes are useful for destroying particular mRNAs, although various ribozymes that cleave mRNA at site-specific recognition sequences can be used. Hammerhead ribozymes cleave mRNAs at locations dictated by flanking regions that form complementary base pairs with the target mRNA. The sole requirement is that the target RNA contain a 5′-UG-3′ nucleotide sequence. The construction and production of hammerhead ribozymes is known in the art. See, for example, U.S. Pat. No. 5,254,678 and WO 02/46449 and references cited therein. Hammerhead ribozyme sequences can be embedded in a stable RNA such as a transfer RNA (tRNA) to increase cleavage efficiency in vivo. Perriman, et al., Proc. Natl. Acad. Sci. USA, 92(13):6175-6179 (1995); de Feyter and Gaudron, Methods in Molecular Biology, Vol. 74, Chapter 43, “Expressing Ribozymes in Plants”, Edited by Turner, P. C, Humana Press Inc., Totowa, N. J. RNA endoribonucleases such as the one that occurs naturally in Tetrahymena thermophila, and which have been described extensively by Cech and collaborators can be useful. See, for example, U.S. Pat. No. 4,987,071.

[0079] Methods based on RNA interference (RNAi) can be used. RNA interference is a cellular mechanism to regulate the expression of genes and the replication of viruses. This mechanism is thought to be mediated by double-stranded small interfering RNA molecules. A cell responds to such a double-stranded RNA by destroying endogenous mRNA having the same sequence as the double-stranded RNA. Methods for designing and preparing interfering RNAs are known to those of skill in the art; see, e.g., WO 99/32619 and WO 01/75164. For example, a construct can be prepared that includes a sequence that is transcribed into an interfering RNA. Such an RNA can be one that can anneal to itself, e.g., a double stranded RNA having a stem-loop structure. One strand of the stem portion of a double stranded RNA comprises a sequence that is similar or identical to the sense coding sequence of the polypeptide of interest, and that is from about 10 nucleotides to about 2,500 nucleotides in length. The length of the sequence that is similar or identical to the sense coding sequence can be from 10 nucleotides to 500 nucleotides, from 15 nucleotides to 300 nucleotides, from 20 nucleotides to 100 nucleotides, or from 25 nucleotides to 100 nucleotides. The other strand of the stem portion of a double stranded RNA comprises an antisense sequence of the biomass-modulating polypeptide of interest, and can have a length that is shorter, the same as, or longer than the corresponding length of the sense sequence. The loop portion of a double stranded RNA can be from 10 nucleotides to 5,000 nucleotides, e.g., from 15 nucleotides to 1,000 nucleotides, from 20 nucleotides to 500 nucleotides, or from 25 nucleotides to 200 nucleotides. The loop portion of the RNA can include an intron. See, e.g., WO 99/53050.

[0080] In some nucleic-acid based methods for inhibition of gene expression in plants, a suitable nucleic acid can be a nucleic acid analog. Nucleic acid analogs can be modified at the base moiety, sugar moiety, or phosphate backbone to improve, for example, stability, hybridization, or solubility of the nucleic acid. Modifications at the base moiety include deoxyuridine for deoxythymidine, and 5-methyl-2′-deoxycytidine and 5-bromo-2′-deoxycytidine for deoxycytidine. Modifications of the sugar moiety include modification of the 2′ hydroxyl of the ribose sugar to form 2′-O-methyl or 2′-O-allyl sugars. The deoxyribose phosphate backbone can be modified to produce morpholino nucleic acids, in which each base moiety is linked to a six-membered morpholino ring, or peptide nucleic acids, in which the deoxyphosphate backbone is replaced by a pseudopeptide backbone and the four bases are retained. See, for example, Summerton and Weller, 1997, Antisense Nucleic Acid Drug Dev., 7:187-195; Hyrup et al., 1996, Bioorgan. Med. Chem., 4: 5-23. In addition, the deoxyphosphate backbone can be replaced with, for example, a phosphorothioate or phosphorodithioate backbone, a phosphoroamidite, or an alkyl phosphotriester backbone.

Transformation

[0081] Nucleic acid molecules of the present invention may be introduced into the genome or the cell of the appropriate host plant by a variety of techniques. These techniques, able to transform a wide variety of higher plant species, are well known and described in the technical and scientific literature (see, e.g., 28-29).

[0082] A variety of techniques known in the art are available for the introduction of DNA into a plant host cell. These techniques include transformation of plant cells by injection (30), microinjection (31), electroporation of DNA (32), PEG (33), use of biolistics (34), fusion of cells or protoplasts (35), and via T-DNA using Agrobacterium tumefaciens (36-37) or Agrobacterium rhizogenes (38) or other bacterial hosts (39), for example.

[0083] In addition, a number of non-stable transformation methods that are well known to those skilled in the art may be desirable for the present invention. Such methods include, but are not limited to, transient expression (40) and viral transfection (41).

[0084] Seeds are obtained from the transformed plants and used for testing stability and inheritance. Generally, two or more generations are cultivated to ensure that the phenotypic feature is stably maintained and transmitted.

[0085] A person of ordinary skill in the art recognizes that after the expression cassette is stably incorporated in transgenic plants and confirmed to be operable, it can be introduced into other plants by sexual crossing. Any of a number of standard breeding techniques can be used, depending upon the species to be crossed.

[0086] The nucleic acid molecules of the present invention may be used to confer the trait of an altered flowering time.

[0087] The nucleic acid molecules of the present invention encode appropriate proteins from any organism, but are preferably found in plants, fungi, bacteria or animals.

[0088] The methods according to the present invention can be applied to any plant, preferably higher plants, pertaining to the classes of Angiospermae and Gymnospermae. Plants of the subclasses of the Dicotylodenae and the Monocotyledonae are particularly suitable. Dicotyledonous plants belonging to the orders of the Magniolales, Illiciales, Laurales, Piperales Aristochiales, Nymphaeales, Ranunculales, Papeverales, Sarraceniaceae, Trochodendrales, Hamamelidales, Eucomiales, Leitneriales, Myricales, Fagales, Casuarinales, Caryophyllales, Batales, Polygonales, Plumbaginales, Dilleniales, Theales, Malvales, Urticales, Lecythidales, Violales, Salicales, Capparales, Ericales, Diapensales, Ebenales, Primulales, Rosales, Fabales, Podostemales, Haloragales, Myrtales, Cornales, Proteales, Santales, Rafflesiales, Celastrales, Euphorbiales, Rhamnales, Sapindales, Juglandales, Geraniales, Polygalales, Umbellales, Gentianales, Polemoniales, Lamiales, Plantaginales, Scrophulariales, Campanulales, Rubiales, Dipsacales, and Asterales, for example, are also suitable. Monocotyledonous plants belonging to the orders of the Alismatales, Hydrocharitales, Najadales, Triuridales, Commelinales, Eriocaulales, Restionales, Poales, Juncales, Cyperales, Typhales, Bromeliales, Zingiberales, Arecales, Cyclanthales, Pandanales, Arales, Lilliales, and Orchidales also may be useful in embodiments of the present invention. Further examples include, but are not limited to, plants belonging to the class of the Gymnospermae are Pinales, Ginkgoales, Cycadales and Gnetales.

[0089] The methods of the present invention are preferably used in plants that are important or interesting for agriculture, horticulture, biomass for bioconversion and/or forestry. Non-limiting examples include, for instance, tobacco, oilseed rape, sugar beet, potatoes, tomatoes, cucumbers, peppers, beans, peas, citrus fruits, avocados, peaches, apples, pears, berries, plumbs, melons, eggplants, cotton, soybean, sunflowers, roses, poinsettia, petunia, guayule, cabbages, spinach, alfalfa, artichokes, sugarcane, mimosa, Servicea lespedera, corn, wheat, rice, rye, barley, sorghum and grasses such as switch grass, giant reed, Bermuda grass, Johnson grass or turf grass, millet, hemp, bananas, poplars, eucalyptus trees and conifers.

Homologues Encompassed by the Invention

[0090] It is known in the art that one or more amino acids in a sequence can be substituted with other amino acid(s), the charge and polarity of which are similar to that of the substituted amino acid, i.e. a conservative amino acid substitution, resulting in a biologically/functionally silent change. Conservative substitutes for an amino acid within the polypeptide sequence can be selected from other members of the class to which the amino acid belongs. Amino acids can be divided into the following four groups: (1) acidic (negatively charged) amino acids, such as aspartic acid and glutamic acid; (2) basic (positively charged) amino acids, such as arginine, histidine, and lysine; (3) neutral polar amino acids, such as serine, threonine, tyrosine, asparagine, and glutamine; and (4) neutral nonpolar (hydrophobic) amino acids such as glycine, alanine, leucine, isoleucine, valine, proline, phenylalanine, tryptophan, cysteine, and methionine.

[0091] Nucleic acid molecules of the present invention can comprise sequences that differ from those encoding a protein or fragment thereof selected from the group consisting of the nucleotide sequences in the sequence listing due to the fact that the different nucleic acid sequence encodes a protein having one or more conservative amino acid changes.

[0092] Biologically functional equivalents of the polypeptides, or fragments thereof, of the present invention can have about 10 or fewer conservative amino acid changes, more preferably about 7 or fewer conservative amino acid changes, and most preferably about 5 or fewer conservative amino acid changes. In a preferred embodiment of the present invention, the polypeptide has between about 5 and about 500 conservative changes, more preferably between about 10 and about 300 conservative changes, even more preferably between about 25 and about 150 conservative changes, and most preferably between about 5 and about 25 conservative changes or between 1 and about 5 conservative changes.

Identification of Useful Nucleic Acid Molecules and Their Corresponding Nucleotide Sequences

[0093] The nucleic acid molecules, and nucleotide sequences thereof, of the present invention were identified by use of a variety of screens that are predictive of nucleotide sequences that provide plants with altered size, vegetative growth, organ number, plant architecture and/or biomass. One or more of the following screens were, therefore, utilized to identify the nucleotide (and amino acid) sequences of the present invention.

[0094] The present invention is further exemplified by the following examples. The examples are not intended to in any way limit the scope of the present application and its uses.

6. Experiments Confirming the Usefulness of the Polynucleotides and Polypeptides of the Invention

[0095] 6.1 General Protocols

Agrobacterium-Mediated Transformation of Arabidopsis

[0096] Wild-type Arabidopsis thaliana Wassilewskija (WS) plants are transformed with Ti plasmids containing clones in the sense orientation relative to the 35S promoter. A Ti plasmid vector useful for these constructs, CRS 338, contains the Ceres-constructed, plant selectable marker gene phosphinothricin acetyltransferase (PAT), which confers herbicide resistance to transformed plants.

[0097] Ten independently transformed events are typically selected and evaluated for their qualitative phenotype in the T₁ generation.

[0098] Preparation of Soil Mixture: 24L SunshineMix #5 soil (Sun Gro Horticulture, Ltd., Bellevue, Wash.) is mixed with 16L Therm-O-Rock vermiculite (Therm-O-Rock West, Inc., Chandler, Ariz.) in a cement mixer to make a 60:40 soil mixture. To the soil mixture is added 2 Tbsp Marathon 1% granules (Hummert, Earth City, Mo.), 3 Tbsp OSMOCOTE® 14-14-14 (Hummert, Earth City, Mo.) and 1 Tbsp Peters fertilizer 20-20-20 (J. R. Peters, Inc., Allentown, Pa.), which are first added to 3 gallons of water and then added to the soil and mixed thoroughly. Generally, 4-inch diameter pots are filled with soil mixture. Pots are then covered with 8-inch squares of nylon netting.

[0099] Planting: Using a 60 mL syringe, 35 mL of the seed mixture is aspirated. 25 drops are added to each pot. Clear propagation domes are placed on top of the pots that are then placed under 55% shade cloth and subirrigated by adding 1 inch of water.

[0100] Plant Maintenance: 3 to 4 days after planting, lids and shade cloth are removed. Plants are watered as needed. After 7-10 days, pots are thinned to 20 plants per pot using forceps. After 2 weeks, all plants are subirrigated with Peters fertilizer at a rate of 1 Tsp per gallon of water. When bolts are about 5-10 cm long, they are clipped between the first node and the base of stem to induce secondary bolts. Dipping infiltration is performed 6 to 7 days after clipping.

[0101] Preparation of Agrobacterium: To 150 mL fresh YEB is added 0.1 mL each of carbenicillin, spectinomycin and rifampicin (each at 100 mg/ml stock concentration). Agrobacterium starter blocks are obtained (96-well block with Agrobacterium cultures grown to an OD₆₀₀ of approximately 1.0) and inoculated one culture vessel per construct by transferring 1 mL from appropriate well in the starter block. Cultures are then incubated with shaking at 27° C. Cultures are spun down after attaining an OD₆₀₀ of approximately 1.0 (about 24 hours). 200 mL infiltration media is added to resuspend Agrobacterium pellets. Infiltration media is prepared by adding 2.2 g MS salts, 50 g sucrose, and 5 μl 2 mg/ml benzylaminopurine to 900 ml water.

[0102] Dipping Infiltration: The pots are inverted and submerged for 5 minutes so that the aerial portion of the plants are in the Agrobacterium suspension. Plants are allowed to grow normally and seed is collected.

High-Throughput Phenotypic Screening of Misexpression Mutants:

[0103] Seed is evenly dispersed into water-saturated soil in pots and placed into a dark 4° C. cooler for two nights to promote uniform germination. Pots are then removed from the cooler and covered with 55% shade cloth for 4-5 days. Cotyledons are fully expanded at this stage. FINALE® (Sanofi Aventis, Paris, France) is sprayed on plants (3 ml FINALE® diluted into 48 oz. water)and repeated every 3-4 days until only transformants remain.

[0104] Screening is routinely performed at four stages: Seedling, Rosette, Flowering, and Senescence.
[0105] Seedling—the time after the cotyledons have emerged, but before the 3^{rd} true leaf begins to form.
[0106] Rosette—the time from the emergence of the 3^{rd} true leaf through just before the primary bolt begins to elongate.
[0107] Flowering—the time from the emergence of the primary bolt to the onset of senescence (with the exception of noting the flowering time itself, most observations should be made at the stage where approximately 50% of the flowers have opened).
[0108] Senescence—the time following the onset of senescence (with the exception of “delayed senescence”, most observations should be made after the plant has completely dried). Seeds are then collected.

[0109] Screens: Screening for increased size, vegetative growth, biomass, lethality, sterility and other modulated characteristics is performed by taking measurements, specifically T₂ measurements were taken as follows:

[0110] Days to Bolt=number of days between sowing of seed and emergence of first inflorescence.

[0111] Rosette Leaf Number at Bolt=number of rosette leaves present at time of emergence of first inflorescence.

[0112] Rosette Area=area of rosette at time of initial inflorescence emergence, using formula ((L×W)*3.14)/4.

[0113] Height=length of longest inflorescence from base to apex. This measurement was taken at the termination of flowering/onset of senescence.

[0114] Primary Inflorescence Thickness=diameter of primary inflorescence 2.5 cm up from base. This measurement was taken at the termination of flowering/onset of senescence.

[0115] Inflorescence Number=total number of unique inflorescences. This measurement was taken at the termination of flowering/onset of senescence.

[0116] PCR was used to amplify the cDNA insert in one randomly chosen T₂ plant. This PCR product was then sequenced to confirm the sequence in the plants.

Results

[0117] Plants transformed with the genes of interest were screened as described above for modulated growth and phenotype characteristics. The observations include those with respect to the entire plant, as well as parts of the plant, such as the roots and leaves. The observations for transformants with each polynucleotide sequence are noted in the Sequence listing for each of the tested nucleotide sequences and the corresponding encoded polypeptide. The modulated characteristics (i.e. observed phenotypes) are noted by an entry in the “miscellaneous features” field for each respective sequence. The “Phenotype” noted in the Sequence Listing for each relevant sequence further includes a statement of the useful utility of that sequence based on the observations.

[0118] The observations made for the various transformants can be categorized, depending upon the relevant plant tissue for the observation and the consequent utility/usefulness of the nucleotide sequence/polypeptide used to make that transformant. Table 1 correlates the shorthand notes in the sequence listing to the observations noted for each transformant (the “description” column), the tissue of the observation, the phenotype thereby associated with the transformant, and the consequent utility/usefulness of the inserted nucleotide sequence and encoded polypeptide (the “translation” column).

[0119] For some of the polynucleotides/polypeptides of the invention, the sequence listing further includes (in a “miscellaneous feature” section) an indication of important identified dominant(s) and the corresponding function of the domain or identified by comparison to the publicly available pfam database.

TABLE 1

| | PHENOTYPE | | | |
|---|---|---|---|---|
| TISSUE | QUALIFIER | PHENOTYPE | DESCRIPTION | TRANSLATION |
| WHOLE | Senescence Time | Early | the plant senesces | Useful for accelerating |
| PLANT | | Senescence | significantly early | crop development and |
| | | | (note the approximate | harvest |
| | | | number of days early | |
| | | | it started to senesce | |
| | | | in the comments) | |
| INFLORESCENCE | Flowering Time | Early Flowering | the plant flowers | Useful for accelerating |
| | | | significantly early | flowering time |
| | | | (note the approximate | |
| | | | number of days early | |
| | | | it flowered in the | |
| | | | comments) | |
| INFLORESCENCE | Flowering Time | Late Flowering | the plant flowers | Useful for delaying |
| | | | significantly late | flowering time |
| | | | (note the approximate | |
| | | | number of days late it | |
| | | | flowered in the | |
| | | | comments) | |
| INFLORESCENCE | Flowering Time | Dtb | days to bolt | Useful for delaying |
| | | | | flowering time |
| WHOLE | Senescence Time | Late Senescence | the plant senesces | Useful for delaying |
| PLANT | | | significantly late | senescence |
| | | | (note the approximate | |
| | | | number of days late it | |
| | | | started to senesce in | |
| | | | the comments) | |
| COTYLEDONS | Silver | Silver | cotyledons have a | Useful for drought or |
| | | | gray/silver colored | stress tolerance |
| | | | surface; This | |
| | | | phenotype is often | |
| | | | accompanied by a | |
| | | | small size mutation, | |
| | | | but not always | |
| WHOLE | Dark Green | Dark Green | plant is visibly darker | Useful for increasing |
| SEEDLING | | | green | chlorophyll and |
| | | | | photosynthetic capacity |
| WHOLE | Color | Dark Green | the plant is | Useful for increasing |
| PLANT | | | abnormally dark | chlorophyll and |
| | | | green | photosynthetic capacity |
| WHOLE | High | High | the plant is purple in | Useful for increasing |
| SEEDLING | Anthocyanin | Anthocyanin | color | increasing anthocyanin |
| | | | | content |
| WHOLE | Color | High | the plant is purple in | Useful for increasing |
| PLANT | | Anthocyanin | color | increasing anthocyanin |
| | | | | content |
| ROOT | No Growth in | No Growth in | roots grow along the | Useful for increasing root |
| | Soil | Soil | soil surface instead of | growth eg to enhance |
| | | | into the soil | nutrient uptake |
| ROOT | Other | Other | this correlates with | Useful for increasing root |
| | | | any root mutant | growth eg to enhance |
| | | | phenotypes which do | nutrient uptake |
| | | | not fit into the above | |
| | | | categories (a picture | |
| | | | should be taken for | |
| | | | documentation) | |
| LATERAL | Number | Less Lateral | there is an | Useful for increasing root |
| ROOTS | | Roots | abnormally low | growth eg to enhance |
| | | | number of lateral | nutrient uptake |
| | | | roots | |
| LATERAL | Other | Other | this correlates with | Useful for increasing root |
| ROOTS | | | any lateral root | growth eg to enhance |
| | | | mutant phenotypes | nutrient uptake |
| | | | which do not fit into | |
| | | | the above categories | |
| | | | (a picture should be | |
| | | | taken for | |
| | | | documentation) | |
| ROOT | Classic | Classic | there is a lack of | Useful for increasing root |
| | | | lateral roots (buds | growth eg to enhance |
| | | | may appear but do | nutrient uptake |
| | | | not elongate) | |
| ROOT | Dwarf | Dwarf | there is a stunted root | Useful for increasing root |
| | | | system | growth eg to enhance |
| | | | | nutrient uptake |
| ROOT | Mid-Section | Mid-Section | there are lateral roots | Useful for increasing root |
| | | | in the top and bottom | growth eg to enhance |
| | | | quarters of the whole | nutrient uptake |
| | | | root, but none in the | |
| | | | middle | |
| ROOT | Split | Split | appears as “classic” | Useful for increasing root |
| | | | but with two primary | growth eg to enhance |
| | | | roots, both | nutrient uptake |
| | | | originating from the | |
| | | | hypocotyl base | |
| ROOT | Other | Other | this correlates with | Useful for increasing root |
| | | | any overall root | growth eg to enhance |
| | | | structure mutant | nutrient uptake |
| | | | phenotypes which do | |
| | | | not fit into the above | |
| | | | categories (a picture | |
| | | | should be taken for | |
| | | | documentation) | |
| PRIMARY | Other | Other | this correlates with | Useful for increasing root |
| ROOT | | | any primary root | growth eg to enhance |
| | | | mutant phenotypes | nutrient uptake |
| | | | which do not fit into | |
| | | | the above categories | |
| | | | (a picture should be | |
| | | | taken for | |
| | | | documentation) | |
| ROOT | Length | Longer Root | the root hairs are | Useful for increasing root |
| HAIRS | | Hair | abnormally long | growth eg to enhance |
| | | | | nutrient uptake |
| ROOT | Length | Smaller Root | the root hairs are | Useful for increasing root |
| HAIRS | | Hair | abnormally short | growth eg to enhance |
| | | | | nutrient uptake |
| ROOT | Number | Less root hairs | there is an | Useful for increasing root |
| HAIRS | | | abnormally low | growth eg to enhance |
| | | | number of root hairs | nutrient uptake |
| ROOT | Other | Other | this correlates with | Useful for increasing root |
| HAIRS | | | any root hair mutant | growth eg to enhance |
| | | | phenotypes which do | nutrient uptake |
| | | | not fit into the above | |
| | | | categories (a picture | |
| | | | should be taken for | |
| | | | documentation) | |
| ROOT | Bulbous Root | Bulbous Root | Bulbous Root Hairs | Useful for increasing root |
| HAIRS | Hairs | Hairs | | growth eg to enhance |
| | | | | nutrient uptake |
| ROOT | Bearded | Bearded | the lateral roots are | Useful for increasing root |
| | (Nitrogen) | (Nitrogen) | long in high nitrogen, | growth eg to enhance |
| | | | and they are short in | nutrient uptake |
| | | | low nitrogen | |
| PRIMARY | Thickness | Thicker Primary | the primary root is | Useful for increasing root |
| ROOT | | Root | abnormally thick | growth eg to enhance |
| | | | | nutrient uptake |
| WHOLE | Stress | Root | Identify plants with | Useful for increasing root |
| PLANT | | Architecture | increased root mass | growth eg to enhance |
| | | | | nutrient uptake |
| PRIMARY | Thickness | Thinner Primary | the primary root is | Useful for increasing root |
| ROOT | | Root | abnormally thin | growth eg to enhance |
| | | | | nutrient uptake |
| PRIMARY | Wavy | Wavy | there is a consistent | Useful for increasing root |
| ROOT | | | and gentle wavy | growth eg to enhance |
| | | | appearance | nutrient uptake |
| LATERAL | Length | Longer Lateral | the lateral roots are | Useful for increasing root |
| ROOTS | | Root | abnormally long | growth eg to enhance |
| | | | | nutrient uptake |
| LATERAL | Number | More Lateral | there is an | Useful for increasing root |
| ROOTS | | Roots | abnormally high | growth eg to enhance |
| | | | number of lateral | nutrient uptake |
| | | | roots | |
| ROOT | Number | More root hairs | there is an | Useful for increasing root |
| HAIRS | | | abnormally high | growth eg to enhance |
| | | | number of root hairs | nutrient uptake |
| | | | | Useful for increasing seed |
| | | | | carbon or nitrogen |
| SEED | Seed Weight | Weight | weight of seed | Useful for increasing seed |
| | | | | weight |
| SILIQUES | Length | Long | siliques are | Useful for increasing |
| | | | abnormally long (the | seed/fruit yield or |
| | | | percent difference in | modifying fruit content |
| | | | length compared to | |
| | | | the control should be | |
| | | | noted in the | |
| | | | comments) | |
| SILIQIUES | Length | Short | siliques are | Useful for increasing |
| | | | abnormally short | seed/fruit yield or |
| | | | (the percent | modifying fruit content |
| | | | difference in length | |
| | | | compared to the | |
| | | | control should be | |
| | | | noted in the | |
| | | | comments) | |
| SILIQUES | Other | Other | this correlates with | Useful for increasing |
| | | | any silique mutant | seed/fruit yield or |
| | | | phenotypes which do | modifying fruit content |
| | | | not fit into the above | |
| | | | categories (a picture | |
| | | | should be taken for | |
| | | | documentation) | |
| ROSETTE | Size | Large | rosette leaves are | Useful for increasing |
| LEAVES | | | abnormally large | vegetative growth and |
| | | | (the percent | enhancing foliage |
| | | | difference in size | |
| | | | compared to the | |
| | | | control should be | |
| | | | noted in the | |
| | | | comments) | |
| | | | | Useful for making |
| | | | | nutraceuticals/pharmaceuticals |
| | | | | in plants |
| HYPOCOTYL | Other | Other | this correlates with | Useful for making larger |
| | | | any hypocotyl mutant | plants |
| | | | phenotypes which do | |
| | | | not fit into the above | |
| | | | categories (a picture | |
| | | | should be taken for | |
| | | | documentation) | |
| WHOLE | Other | Other | this correlates with | Useful for making larger |
| SEEDLING | | | any whole plant | plants |
| | | | mutant phenotypes | |
| | | | which do not fit into | |
| | | | the above categories | |
| | | | (a picture should be | |
| | | | taken for | |
| | | | documentation) | |
| WHOLE | Other | Other | this correlates with | Useful for making larger |
| PLANT | | | any whole plant | plants |
| | | | mutant phenotypes | |
| | | | which do not fit into | |
| | | | the above categories | |
| | | | (a picture should be | |
| | | | taken for | |
| | | | documentation) | |
| CAULINE | Petiole Length | Long Petioles | the cauline petioles | Useful for making larger |
| LEAVES | | | are abnormally long | plants |
| | | | (the percent | |
| | | | difference in size | |
| | | | compared to the | |
| | | | control should be | |
| | | | noted in the | |
| | | | comments) | |
| WHOLE | Size | Large | plant is abnormally | Useful for making larger |
| SEEDLING | | | large (the percent | plants |
| | | | difference in size | |
| | | | compared to the | |
| | | | control should be | |
| | | | noted in the | |
| | | | comments) | |
| WHOLE | Size | Large | plant is abnormally | Useful for making larger |
| PLANT | | | large (the percent | plants |
| | | | difference in size | |
| | | | compared to the | |
| | | | control should be | |
| | | | noted in the | |
| | | | comments) | |
| SEED | Lethal | Lethal | the seed is inviable | Useful for making lethal |
| | | | and appears as a | plants for genetic |
| | | | small, dark, raisin- | confinement systems |
| | | | like seed in the | |
| | | | mature silique | |
| WHOLE | Germination | No Germination | none of the seed | Useful for making lethal |
| SEEDLING | | | germinates | plants for genetic |
| | | | | confinement systems |
| WHOLE | Germination | Poor | a portion of the seed | Useful for making lethal |
| SEEDLING | | Germination | never germinates | plants for genetic |
| | | | | confinement systems |
| WHOLE | Germination | Slow | a portion of the seed | Useful for making lethal |
| SEEDLING | | Germination | germinates | plants for genetic |
| | | | significantly later | confinement systems |
| | | | than the rest of the | |
| | | | seed in the pot | |
| ROSETTE | Vitrified | Vitrified | leaves are somewhat | Useful for making lethal |
| LEAVES | | | translucent or ?water | plants for genetic |
| | | | soaked? | confinement systems |
| CAULINE | Vitrified | Vitrified | leaves are somewhat | Useful for making lethal |
| LEAVES | | | translucent or ?water | plants for genetic |
| | | | soaked? | confinement systems |
| COTYLEDONS | Albino | Opaque Albino | plant is opaque and | Useful for making lethal |
| | | | devoid of pigment | plants for genetic |
| | | | | confinement systems |
| COTYLEDONS | Albino | Translucent | plant is translucent | Useful for making lethal |
| | | Albino | and devoid of | plants for genetic |
| | | | pigment | confinement systems |
| WHOLE | Lethal | Seedling Lethal | cotyledons emerge | Useful for making lethal |
| SEEDLING | | | (although they are | plants for genetic |
| | | | often small), but then | confinement systems |
| | | | the plant ceases to | |
| | | | develop further; No | |
| | | | true leaves appear | |
| | | | and the plant dies | |
| | | | early (These differ | |
| | | | from yellow-green | |
| | | | lethals in that the | |
| | | | cotyledons are wild- | |
| | | | type in color and may | |
| | | | not look differ | |
| WHOLE | Lethal | Yellow-Green | cotyledons are small | Useful for making lethal |
| SEEDLING | | Lethal | and pale yellow- | plants for genetic |
| | | | green in color, but | confinement systems |
| | | | NOT totally devoid | |
| | | | of pigment; In | |
| | | | addition to yellow- | |
| | | | green cotyledons, | |
| | | | these plants produce | |
| | | | no or severely | |
| | | | reduced size true | |
| | | | leaves, which, if | |
| | | | present, are also | |
| | | | yellow-green; These | |
| | | | plants die prem | |
| WHOLE | Meristem Mutant | Meristem Mutant | this term | Useful for making lethal |
| SEEDLING | | | encompasses a | plants for genetic |
| | | | variety of | confinement systems |
| | | | phenotypes, all of | |
| | | | which have one thing | |
| | | | in common, i.e., they | |
| | | | all have something | |
| | | | significantly wrong | |
| | | | with how the | |
| | | | meristem is | |
| | | | producing its leaves; | |
| | | | Depending on the | |
| | | | severity of the | |
| | | | phenotype, the plants | |
| | | | in this category | |
| WHOLE | Seedling | Seedling | this term | Useful for making lethal |
| SEEDLING | Defective | Defective | encompasses a | plants for genetic |
| | | | variety of phenotypes | confinement systems |
| | | | which share similar | |
| | | | characteristics, i.e., | |
| | | | they are small, have | |
| | | | distorted structures, | |
| | | | and are prone to early | |
| | | | death; For example, | |
| | | | patterning mutants | |
| | | | would be a class of | |
| | | | mutants which fall | |
| | | | under this category | |
| WHOLE | Color | Yellow-Green | the leaves and | Useful for making lethal |
| PLANT | | Viable 1 | cotyledons are | plants for genetic |
| | | | yellow-green in | confinement systems |
| | | | color, but this is not a | |
| | | | lethal phenotype | |
| WHOLE | Color | Yellow-Green | the leaves are yellow- | Useful for making lethal |
| PLANT | | Viable 2 | green in color but the | plants for genetic |
| | | | cotyledons are a | confinement systems |
| | | | wild-type green in | |
| | | | color | |
| WHOLE | Color | Yellow-Green | the leaves start out | Useful for making lethal |
| PLANT | | Viable 3 | wild-type green and | plants for genetic |
| | | | gradually turn | confinement systems |
| | | | yellow-green in | |
| | | | color, while the | |
| | | | cotyledons stay wild- | |
| | | | type green | |
| WHOLE | Color | Yellow-Green | the leaves appear | Useful for making lethal |
| PLANT | | Viable 4 | wild-type green, but | plants for genetic |
| | | | slowly turn yellow- | confinement systems |
| | | | green over time, | |
| | | | while the cotyledons | |
| | | | appear and remain | |
| | | | yellow-green | |
| WHOLE | Stress | Seed Bleaching | Identify plants whose | Useful for making low |
| PLANT | | | seed coats do not | fiber seeds with increased |
| | | | bleach out under long | digestability |
| | | | bleach soaking | |
| ROSETTE | Fused | Leaf Fused to | the leaf is fused to an | Useful for making |
| LEAVES | | Inflorescence | inflorescence | ornamental plants with |
| | | | | flowers and leaves fused |
| ROSETTE | Interveinal | Interveinal | the leaf tissue is | Useful for making |
| LEAVES | Chlorosis | Chlorosis | chlorotic between its | ornamental plants with |
| | | | veins | modified color |
| CAULINE | Interveinal | Interveinal | the leaf tissue is | Useful for making |
| LEAVES | Chlorosis | Chlorosis | chlorotic between its | ornamental plants with |
| | | | veins | modified color |
| FLOWER | Organ | Fused Sepals | the sepals are fused | Useful for making |
| | Morphology | | together and won?t | ornamental plants with |
| | | | open naturally, but | modified flowers |
| | | | the flower is | |
| | | | otherwise wild-type | |
| FLOWER | Organ | Narrow Petals | the petals are | Useful for making |
| | Morphology | | abnormally narrow | ornamental plants with |
| | | | | modified flowers |
| FLOWER | Organ | Narrow Sepals | the sepals are | Useful for making |
| | Morphology | | abnormally narrow | ornamental plants with |
| | | | | modified flowers |
| FLOWER | Organ | Short Petals | the petals are | Useful for making |
| | Morphology | | abnormally short | ornamental plants with |
| | | | | modified flowers |
| FLOWER | Organ | Short Sepals | the sepals are | Useful for making |
| | Morphology | | abnormally short | ornamental plants with |
| | | | | modified flowers |
| FLOWER | Size | Large | flower is abnormally | Useful for making |
| | | | large (the percent | ornamental plants with |
| | | | difference in size | modified flowers |
| | | | compared to the | |
| | | | control should be | |
| | | | noted in the | |
| | | | comments) | |
| FLOWER | Size | Small | flower is abnormally | Useful for making |
| | | | small (the percent | ornamental plants with |
| | | | difference in size | modified flowers |
| | | | compared to the | |
| | | | control should be | |
| | | | noted in the | |
| | | | comments) | |
| FLOWER | Other | Other | this correlates with | Useful for making |
| | | | any flower mutant | ornamental plants with |
| | | | phenotypes which do | modified flowers |
| | | | not fit into the above | |
| | | | categories (a picture | |
| | | | should be taken for | |
| | | | documentation) | |
| INFLORESCENCE | Aerial Rosette | Aerial Fosette | rosette forms at or | Useful for making |
| | | | above the first | ornamental plants with |
| | | | internode | modified flowers |
| INFLORESCENCE | Appearance | Corkscrew | the inflorescence is | Useful for making |
| | | Appearance | really twisted, almost | ornamental plants with |
| | | | like a corkscrew, but | modified flowers |
| | | | somewhat more | |
| | | | irregular | |
| INFLORESCENCE | Appearance | Curved | the inflorescence has | Useful for making |
| | | Appearance | a slight, irregular | ornamental plants with |
| | | | curve upwards, | modified flowers |
| | | | greater than that of | |
| | | | the control plants | |
| INFLORESCENCE | Appearance | Multi- | the inflorescence is | Useful for making |
| | | Inflorescence | fused to another | ornamental plants with |
| | | Fusion | inflorescence, | modified flowers |
| | | | creating a celery-like | |
| | | | appearance | |
| INFLORESCENCE | Appearance | Undulate | the inflorescence is | Useful for making |
| | | Appearance | wavy in appearance | ornamental plants with |
| | | | | modified flowers |
| INFLORESCENCE | Branching | Acauline | first branching is not | Useful for making |
| | | Branching | subtended by a | ornamental plants with |
| | | | cauline leaf | modified flowers |
| INFLORESCENCE | Wax | Glaucous | inflorescence is | Useful for making |
| | | | abnormally dull in | ornamental plants with |
| | | | appearance | modified flowers |
| INFLORESCENCE | Wax | Glossy | inflorescence is | Useful for making |
| | | | shiny/glossy in | ornamental plants with |
| | | | appearance | modified flowers |
| INFLORESCENCE | Other | Other | this correlates with | Useful for making |
| | | | any inflorescence | ornamental plants with |
| | | | mutant phenotypes | modified flowers |
| | | | which do not fit into | |
| | | | the above categories | |
| | | | (a picture should be | |
| | | | taken for | |
| | | | documentation) | |
| COTYLEDONS | Asymmetric | Asymmetric | the shape of the | Useful for making |
| | | | cotyledon is | ornamental plants with |
| | | | asymmetric in | modified foliage |
| | | | reference to the | |
| | | | vertical axis | |
| ROSETTE | Other | Other | this correlates with | Useful for making |
| LEAVES | | | any leaf mutant | ornamental plants with |
| | | | phenotypes which do | modified leaves |
| | | | not fit into the above | |
| | | | categories (a picture | |
| | | | should be taken for | |
| | | | documentation) | |
| CAULINE | Other | Other | this correlates with | Useful for making |
| LEAVES | | | any cauline mutant | ornamental plants with |
| | | | phenotypes which do | modified leaves |
| | | | not fit into the above | |
| | | | categories (a picture | |
| | | | should be taken for | |
| | | | documentation) | |
| FLOWER | Homeotic | Homeotic | the flower has one or | Useful for making plants |
| | Mutant | Mutant | more of its organs | sterile and for genetic |
| | | | converted to another | confinement |
| | | | type of organ | |
| | | | (specific details | |
| | | | should be noted in | |
| | | | the comments) | |
| FLOWER | Organ | Aberrant Organ | there is an abnormal | Useful for making plants |
| | Morphology | Number | number of some or | sterile and for genetic |
| | | | all of the flowers | confinement |
| | | | organs | |
| FLOWER | Organ | Short Stamens | the stamens are | Useful for making plants |
| | Morphology | | abnormally short; | sterile and for genetic |
| | | | This often leads to | confinement |
| | | | mechanical problems | |
| | | | with fertility | |
| FLOWER | Fertility | Aborted fertility | the ovule is | Useful for making plants |
| | | | unfertilized and | sterile and for genetic |
| | | | appears as a brown or | confinement |
| | | | white speck in the | |
| | | | mature silique | |
| FLOWER | Fertility | Female-sterile | there is a problem | Useful for making plants |
| | | | with the ovules such | sterile and for genetic |
| | | | that no fertilization is | confinement |
| | | | occurring | |
| FLOWER | Fertility | Male-sterile | there is a problem | Useful for making plants |
| | | | with the pollen such | sterile and for genetic |
| | | | that no fertilization is | confinement |
| | | | occurring | |
| FLOWER | Fertility | Reduced fertility | a reduced number of | Useful for making plants |
| | | | successful | sterile and for genetic |
| | | | fertilization events, | confinement |
| | | | and therefore seeds, | |
| | | | are being produced | |
| | | | by the plant | |
| FLOWER | Fertility | Sterile | no successful | Useful for making plants |
| | | | fertilization events, | sterile and for genetic |
| | | | and therefore no seed | confinement |
| | | | is being produced by | |
| | | | the plant; The reason | |
| | | | for this sterility is not | |
| | | | known at the time of | |
| | | | the observation | |
| FLOWER | Fertility | Other | this correlates with | Useful for making plants |
| | | | any fertility mutant | sterile and for genetic |
| | | | phenotypes which do | confinement |
| | | | not fit into the above | |
| | | | categories (a picture | |
| | | | should be taken for | |
| | | | documentation) | |
| WHOLE | Stress | Early Flowering | Identify plants that | Useful for making plants |
| PLANT | | | flower early | that flower early |
| COTYLEDONS | Petiole Length | Long Petioles | the cotyledon petioles | Useful for making plants |
| | | | are abnormally long | that grow and better in |
| | | | (the percent | shade |
| | | | difference in size | |
| | | | compared to the | |
| | | | control should be | |
| | | | noted in the | |
| | | | comments) | |
| ROSETTE | Petiole Length | Varying Petiole | the leaf petioles vary | Useful for making plants |
| LEAVES | | Lengths | in length throughout | that grow better in shade |
| | | | the rosette | |
| ROSETTE | Petiole Length | Long Petioles | the leaf petioles are | Useful for making plants |
| LEAVES | | | abnormally long (the | that grow better in shade |
| | | | percent difference in | |
| | | | size compared to the | |
| | | | control should be | |
| | | | noted in the | |
| | | | comments) | |
| | | | | Useful for making plants |
| | | | | tolerant to biotic stress |
| WHOLE | Stress | | Identify plants able to | Useful for making plants |
| PLANT | | | tolerate high density | tolerant to density and |
| | | | and no phosphate and | low fertilizer |
| | | | nitrogen, possible | |
| | | | lead assay for vigor | |
| | | | under population | |
| | | | density and low | |
| | | | nutrient conditions | |
| WHOLE | Stress | pH (high) | Identify plants | Useful for making plants |
| PLANT | | | tolerant to high PH, | tolerant to high pH or low |
| | | | and possibly low | phosphate |
| | | | phosphate | |
| WHOLE | Stress | Low Nitrate | Identify plants | Useful for making plants |
| PLANT | | | tolerant to low | tolerant to low nitrogen |
| | | | nitrogen/nitrate | |
| | | | growth media | |
| WHOLE | Stress | LNABA | Identify plants | Useful for making plants |
| PLANT | | | tolerant to low | tolerant to low nitrogen |
| | | | nitrogen and high | |
| | | | ABA concentrations | |
| WHOLE | Stress | No Nitrogen | Identify plants with | Useful for making plants |
| PLANT | | | increased vigor under | tolerant to low nitrogen |
| | | | no nitrogen | |
| | | | conditions | |
| WHOLE | Stress | MSX | Identify plants | Useful for making plants |
| PLANT | | | tolerant to nitrogen | tolerant to low nitrogen |
| | | | assimilation inhibitor, | |
| | | | and possibly low | |
| | | | nitrogen tolerance | |
| | | | and/or seed nitrogen | |
| | | | accumulation | |
| WHOLE | Stress | No N, No PO4 | Identify plants | Useful for making plants |
| PLANT | | | tolerant to no | tolerant to low |
| | | | nitrogen and no | nitrogen/low phosphate |
| | | | phosphate growth | |
| | | | media | |
| WHOLE | Stress | Oxidative | Identify plants | Useful for making plants |
| PLANT | | | tolerant to oxidative | tolerant to oxidative |
| | | | stress | stresses |
| ROSETTE | Trichomes | Few Trichomes | trichomes are sparse | Useful for making plants |
| LEAVES | | | but present on the | with enhanced chemical |
| | | | leaves | composition |
| ROSETTE | Trichomes | Glabrous | trichomes are totally | Useful for making plants |
| LEAVES | | | absent | with enhanced chemical |
| | | | | composition |
| ROSETTE | Trichomes | Abnormal | the trichomes are | Useful for making plants |
| LEAVES | | Trichome Shape | abnormally shaped | with enhanced chemical |
| | | | | composition |
| CAULINE | Trichomes | Few Trichomes | trichomes are sparse | Useful for making plants |
| LEAVES | | | but present on the | with enhanced chemical |
| | | | leaves | composition |
| CAULINE | Trichomes | Glabrous | trichomes are totally | Useful for making plants |
| LEAVES | | | absent | with enhanced chemical |
| | | | | composition |
| CAULINE | Trichomes | Abnormal | the trichomes are | Useful for making plants |
| LEAVES | | Trichome Shape | abnormally shaped | with enhanced chemical |
| | | | | composition |
| INFLORESCENCE | Trichomes | Glabrous | trichomes are totally | Useful for making plants |
| | | | absent | with enhanced chemical |
| | | | | composition |
| INFLORESCENCE | Trichomes | Abnormal | the trichomes are | Useful for making plants |
| | | Trichome Shape | abnormally shaped | with enhanced chemical |
| | | | | composition |
| ROSETTE | Curled | Corkscrew | leaves appear as | Useful for making plants |
| LEAVES | | | “Curled 5”, with the | with altered leaf shape eg |
| | | | additional attribute of | curled leaves |
| | | | twisting like a | |
| | | | corkscrew, instead of | |
| | | | uniformly curling | |
| | | | from both sides of the | |
| | | | leaf | |
| ROSETTE | Curled | Cup-shaped | leaves are curled up | Useful for making plants |
| LEAVES | | | at the leaf margins | with altered leaf shape eg |
| | | | such that they form a | curled leaves |
| | | | cup or bowl-like | |
| | | | shape | |
| ROSETTE | Curled | Curled 1 | leaves are abnormally | Useful for making plants |
| LEAVES | | | curled slightly up or | with altered leaf shape eg |
| | | | down at the leaf | curled leaves |
| | | | margins, but do not | |
| | | | fall under the “cup- | |
| | | | shaped” description | |
| | | | (least severe type) | |
| ROSETTE | Curled | Curled 2 | leaves are abnormally | Useful for making plants |
| LEAVES | | | curled up or down at | with altered leaf shape eg |
| | | | the leaf margins, but | curled leaves |
| | | | do not fall under the | |
| | | | “cup-shaped” | |
| | | | description (more | |
| | | | severe than Curled 1, | |
| | | | but less severe than | |
| | | | Curled 3) | |
| ROSETTE | Curled | Curled 3 | leaves are abnormally | Useful for making plants |
| LEAVES | | | curled up or down at | with altered leaf shape eg |
| | | | the leaf margins, but | curled leaves |
| | | | do not fall under the | |
| | | | “cup-shaped” | |
| | | | description (more | |
| | | | severe than Curled 2, | |
| | | | but less severe than | |
| | | | Curled 4) | |
| ROSETTE | Curled | Curled 4 | leaves are abnormally | Useful for making plants |
| LEAVES | | | curled/rolled up or | with altered leaf shape eg |
| | | | down at the leaf | curled leaves |
| | | | margins (more | |
| | | | severe than Curled 3, | |
| | | | but less severe than | |
| | | | Curled 5) | |
| ROSETTE | Curled | Curled 5 | leaves are completely | Useful for making plants |
| LEAVES | | | curled/rolled up or | with altered leaf shape eg |
| | | | down at the leaf | curled leaves |
| | | | margins (most severe | |
| | | | type) | |
| CAULINE | Curled | Corkscrew | leaves appear as | Useful for making plants |
| LEAVES | | | “Curled 5”, with the | with altered leaf shape eg |
| | | | additional attribute of | curled leaves |
| | | | twisting like a | |
| | | | corkscrew, instead of | |
| | | | uniformly curling | |
| | | | from both sides of the | |
| | | | leaf | |
| CAULINE | Curled | Cup-shaped | the cauline leaves are | Useful for making plants |
| LEAVES | | | curled up at the leaf | with altered leaf shape eg |
| | | | margins such that | curled leaves |
| | | | they form a cup or | |
| | | | bowl-like shape | |
| CAULINE | Curled | Curled 1 | the cauline leaves are | Useful for making plants |
| LEAVES | | | abnormally curled | with altered leaf shape eg |
| | | | slightly up or down at | curled leaves |
| | | | the leaf margins, but | |
| | | | do not fall under the | |
| | | | “cup-shaped” | |
| | | | description (least | |
| | | | severe type) | |
| CAULINE | Curled | Curled 2 | the cauline leaves are | Useful for making plants |
| LEAVES | | | abnormally curled up | with altered leaf shape eg |
| | | | or down at the leaf | curled leaves |
| | | | margins, but do not | |
| | | | fall under the “cup- | |
| | | | shaped” description | |
| | | | (more severe than | |
| | | | Curled 1, but less | |
| | | | severe than Curled 3) | |
| CAULINE | Curled | Curled 3 | the cauline leaves are | Useful for making plants |
| LEAVES | | | abnormally curled up | with altered leaf shape eg |
| | | | or down at the leaf | curled leaves |
| | | | margins, but do not | |
| | | | fall under the “cup- | |
| | | | shaped” description | |
| | | | (more severe than | |
| | | | Curled 2, but less | |
| | | | severe than Curled 4) | |
| CAULINE | Curled | Curled 4 | the cauline leaves are | Useful for making plants |
| LEAVES | | | abnormally | with altered leaf shape eg |
| | | | curled/rolled up or | curled leaves |
| | | | down at the leaf | |
| | | | margins (more | |
| | | | severe than Curled 3, | |
| | | | but less severe than | |
| | | | Curled 5) | |
| CAULINE | Curled | Curled 5 | the cauline leaves are | Useful for making plants |
| LEAVES | | | completely | with altered leaf shape eg |
| | | | curled/rolled up or | curled leaves |
| | | | down at the leaf | |
| | | | margins (most severe | |
| | | | type) | |
| ROSETTE | Size | Small | rosette leaves are | Useful for making plants |
| LEAVES | | | abnormally small | with decreased vegetative |
| | | | (the percent | growth |
| | | | difference in size | |
| | | | compared to the | |
| | | | control should be | |
| | | | noted in the | |
| | | | comments) | |
| COTYLEDONS | Wilted | Wilted | cotyledons appear | Useful for making plants |
| | | | wilted, i.e., they look | with enhanced abiotic |
| | | | as though they have | stress tolerance |
| | | | suffered from | |
| | | | drought conditions | |
| ROSETTE | Wax | Glaucous | leaves are abnormally | Useful for making plants |
| LEAVES | | | dull in appearance | with enhanced abiotic |
| | | | | stress tolerance |
| ROSETTE | Wax | Glossy | leaves are | Useful for making plants |
| LEAVES | | | shiny/glossy in | with enhanced abiotic |
| | | | appearance | stress tolerance |
| CAULINE | Wax | Glaucous | leaves are abnormally | Useful for making plants |
| LEAVES | | | dull in appearance | with enhanced abiotic |
| | | | | stress tolerance |
| CAULINE | Wax | Glossy | leaves are | Useful for making plants |
| LEAVES | | | shiny/glossy in | with enhanced abiotic |
| | | | appearance | stress tolerance |
| WHOLE | Stress | Metabolic | Identify plants with | Useful for making plants |
| PLANT | | Profiling | altered metabolic | with enhanced metabolite |
| | | | profiles as defined in | accumulation |
| | | | 4a | |
| WHOLE | Stress | Plant | Identify plants with | Useful for making plants |
| PLANT | | Architecture | improved architecture | with enhanced plant |
| | | | | architecture |
| WHOLE | Stress | ABA | Identify plants | Useful for making plants |
| PLANT | | | tolerant to ABA, and | with enhanced tolerance |
| | | | possibly drought | to drought |
| | | | and/or other stresses | |
| WHOLE | Stress | Mannitol | Identify plants | Useful for making plants |
| PLANT | | | tolerant to mannitol, | with enhanced tolerance |
| | | | and possibly drought | to drought |
| | | | stress | |
| WHOLE | Stress | Dessication | Identify plants | Useful for making plants |
| PLANT | | | tolerant to water loss, | with enhanced tolerance |
| | | | possibly drought | to drought |
| | | | stress tolerant | |
| WHOLE | Stress | High Sucrose | Identify plants | Useful for making plants |
| PLANT | | | tolerant to high | with enhanced tolerance |
| | | | sucrose conditions | to drought |
| | | | (possible Lead assay | |
| | | | for C/N partitioning) | |
| WHOLE | Stress | Heat | Identify plants with | Useful for making plants |
| PLANT | | | thermotolerance | with enhanced tolerance |
| | | | | to heat |
| WHOLE | Stress | High Nitrogen | Identify plants | Useful for making plants |
| PLANT | | | tolerant to high | with enhanced tolerance |
| | | | nitrogen conditions | to high nitrogen |
| WHOLE | Stress | Etiolation | Identify plants with | Useful for making plants |
| PLANT | | | increased vigor in the | with enhanced tolerance |
| | | | dark | to light stress |
| ROSETTE | Disorganized | Disorganized | rosette leaves do not | Useful for making plants |
| LEAVES | Rosette | Rosette | appear in the normal | with increased biomass |
| | | | fashion, i.e., their | |
| | | | phyllotaxy may be | |
| | | | abnormal or too | |
| | | | many leaves may be | |
| | | | emerging in | |
| | | | comparison to the | |
| | | | control | |
| INFLORESCENCE | Phyllotaxy | Even Phyllotaxy | a phyllotaxy mutant | Useful for making plants |
| | | | whose new branches | with increased biomass |
| | | | emerge at exactly the | |
| | | | same height as each | |
| | | | other, i.e., there is no | |
| | | | internode between | |
| | | | them | |
| COTYLEDONS | Shape | Elliptic Shape | cotyledons are quite | Useful for making plants |
| | | | narrow and pointed, | with increased biomass |
| | | | more so than | and foliage |
| | | | lanceolate | |
| ROSETTE | Fused | Leaf Fused to | the leaf is fused to its | Useful for making plants |
| LEAVES | | Petiole | petiole | with increased biomass |
| | | | | and foliage |
| ROSETTE | Shape | Cordate Shaped | similar to ovate, | Useful for making plants |
| LEAVES | | | except the leaf is not | with increased biomass |
| | | | rounded at its base | and foliage |
| ROSETTE | Shape | Elliptic Shaped | leaves are quite | Useful for making plants |
| LEAVES | | | narrow and pointed, | with increased biomass |
| | | | more so that | and foliage |
| | | | lanceolate | |
| ROSETTE | Shape | Lanceolate | leaves are narrow and | Useful for making plants |
| LEAVES | | Shaped | come to a dull point | with increased biomass |
| | | | at the apex | and foliage |
| ROSETTE | Shape | Lobed Shaped | leaves have very deep | Useful for making plants |
| LEAVES | | | and rounded | with increased biomass |
| | | | serrations, giving an | and foliage |
| | | | appearance of many | |
| | | | lobes forming the | |
| | | | margins of the leaves | |
| ROSETTE | Shape | Oval Shaped | leaves are much | Useful for making plants |
| LEAVES | | | rounder than wild- | with increased biomass |
| | | | type | and foliage |
| ROSETTE | Shape | Ovate Shaped | leaves are wider at | Useful for making plants |
| LEAVES | | | base than at apex, | with increased biomass |
| | | | otherwise similar to | and foliage |
| | | | wild-type | |
| ROSETTE | Shape | Serrate Margins | leaf margins have | Useful for making plants |
| LEAVES | | | little ?teeth? on them, | with increased biomass |
| | | | i.e., they are serrated | and foliage |
| ROSETTE | Shape | Trident Shaped | leaves look | Useful for making plants |
| LEAVES | | | somewhat like a | with increased biomass |
| | | | trident, i.e., they have | and foliage |
| | | | a sharp point at the | |
| | | | apex, and a sharp | |
| | | | point on each side | |
| ROSETTE | Shape | Undulate Shaped | leaves are wavy | Useful for making plants |
| LEAVES | | | | with increased biomass |
| | | | | and foliage |
| WHOLE | Rosette Shape | Bushy Rosette | the different petioles | Useful for making plants |
| PLANT | | Shaped | have very varied | with increased biomass |
| | | | liminal angles, giving | and foliage |
| | | | the plant a very | |
| | | | bushy appearance; | |
| | | | This is often | |
| | | | accompanied by a | |
| | | | “Disorganized | |
| | | | Rosette” phenotype | |
| WHOLE | Rosette Shape | Flat Rosette | the petioles have a | Useful for making plants |
| PLANT | | Shaped | very small liminal | with increased biomass |
| | | | angle, i.e., the rosette | and foliage |
| | | | appears flat instead of | |
| | | | having its usual slight | |
| | | | vertical angle | |
| WHOLE | Rosette Shape | Standing Rosette | the petioles have a | Useful for making plants |
| PLANT | | Shaped | very large liminal | with increased biomass |
| | | | angle, i.e., it appears | and foliage |
| | | | as though the leaves | |
| | | | are standing up | |
| | | | instead of having | |
| | | | their usual small | |
| | | | vertical angle from | |
| | | | the soil | |
| CAULINE | Fused | Leaf Fused to | the cauline leaf is | Useful for making plants |
| LEAVES | | Inflorescence | fused to an | with increased biomass |
| | | | inflorescence or | and foliage |
| | | | branch | |
| CAULINE | Fused | Leaf Fused to | the cauline leaf is | Useful for making plants |
| LEAVES | | Leaf | fused to itself or | with increased biomass |
| | | | another cauline leaf | and foliage |
| CAULINE | Shape | Cordate Shaped | similar to ovate, | Useful for making plants |
| LEAVES | | | except the leaf is not | with increased biomass |
| | | | rounded at its base | and foliage |
| CAULINE | Shape | Elliptic Shaped | leaves are quite | Useful for making plants |
| LEAVES | | | narrow and pointed, | with increased biomass |
| | | | more so that | and foliage |
| | | | lanceolate | |
| CAULINE | Shape | Lanceolate | leaves are narrow and | Useful for making plants |
| LEAVES | | Shaped | come to a dull point | with increased biomass |
| | | | at the apex | and foliage |
| CAULINE | Shape | Lobed Shaped | leaves have very deep | Useful for making plants |
| LEAVES | | | and rounded | with increased biomass |
| | | | serrations, giving an | and foliage |
| | | | appearance of many | |
| | | | lobes forming the | |
| | | | margins of the leaves | |
| CAULINE | Shape | Oval Shaped | leaves are much | Useful for making plants |
| LEAVES | | | rounder than wild- | with increased biomass |
| | | | type | and foliage |
| CAULINE | Shape | Ovate Shaped | leaves are wider at | Useful for making plants |
| LEAVES | | | base than at apex, | with increased biomass |
| | | | otherwise similar to | and foliage |
| | | | wild-type | |
| CAULINE | Shape | Serrate Margins | leaf margins have | Useful for making plants |
| LEAVES | | | little ?teeth? on them, | with increased biomass |
| | | | i.e., they are serrated | and foliage |
| CAULINE | Shape | Trident Shaped | leaves look | Useful for making plants |
| LEAVES | | | somewhat like a | with increased biomass |
| | | | trident, i.e., they have | and foliage |
| | | | a sharp point at the | |
| | | | apex, and a sharp | |
| | | | point on each side | |
| CAULINE | Shape | Undulate Shaped | leaves are wavy | Useful for making plants |
| LEAVES | | | | with increased biomass |
| | | | | and foliage |
| CAULINE | Size | Large | cauline is abnormally | Useful for making plants |
| LEAVES | | | large (the percent | with increased biomass |
| | | | difference in size | and foliage |
| | | | compared to the | |
| | | | control should be | |
| | | | noted in the | |
| | | | comments) | |
| CAULINE | Size | Small | cauline is abnormally | Useful for making plants |
| LEAVES | | | small (the percent | with increased biomass |
| | | | difference in size | and foliage |
| | | | compared to the | |
| | | | control should be | |
| | | | noted in the | |
| | | | comments) | |
| LATERAL | Length | Smaller Lateral | the lateral roots are | Useful for making plants |
| ROOTS | | Root | abnormally short | with increased root |
| | | | | growth to prevent lodging |
| | | | | or enhance nutrient |
| | | | | uptake |
| PRIMARY | Length | Long Primary | the primary root is | Useful for making plants |
| ROOT | | Root | abnormally long | with increased root |
| | | | (the percent | growth to prevent lodging |
| | | | difference in size | or enhance nutrient |
| | | | compared to the | uptake |
| | | | control should be | |
| | | | noted in the | |
| | | | comments) | |
| PRIMARY | Length | Short Primary | the primary root is | Useful for making plants |
| ROOT | | Root | abnormally short | with increased root |
| | | | (the percent | growth to prevent lodging |
| | | | difference in size | or enhance nutrient |
| | | | compared to the | uptake |
| | | | control should be | |
| | | | noted in the | |
| | | | comments) | |
| WHOLE | Stress | Plant Size | Identify plants of | Useful for making plants |
| PLANT | | | increased size | with increased size and |
| | | | compared to wild | biomass |
| | | | type | |
| WHOLE | Stress | Starch | Identify plants with | Useful for making plants |
| PLANT | | | increased starch | with increased starch |
| | | | accumulation | content |
| WHOLE | Stress | Cold | Identify plants that | Useful for making plants |
| PLANT | | Germination | germinate better at | with increased tolerance |
| | | | cold temperatures | to cold stress |
| WHOLE | Stress | Cold Growth | Identify plants that | Useful for making plants |
| PLANT | | | grow faster at cold | with increased tolerance |
| | | | temperatures | to cold stress |
| WHOLE | Stress | Soil Drought | Identify plants with | Useful for making plants |
| PLANT | | | increased tolerance to | with increased tolerance |
| | | | soil drought | to drought |
| WHOLE | Stress | Soil Drought - | Identify plants that | Useful for making plants |
| PLANT | | Desiccation | are tolerant to low | with increased tolerance |
| | | tolerance | soil moisture and | to drought |
| | | | resist wilting | |
| WHOLE | Stress | PEG | Identify plants | Useful for making plants |
| PLANT | | | tolerant to PEG, and | with increased tolerance |
| | | | possibly drought | to drought |
| | | | stress | |
| SEED | Size | Large | the seed is | Useful for making plants |
| | | | abnormally large | with larger seeds |
| | | | (the percent | |
| | | | difference in size | |
| | | | compared to the | |
| | | | control should be | |
| | | | noted in the | |
| | | | comments) | |
| INFLORESCENCE | Branching | Asecondary | the plant does not | Useful for making plants |
| | | Branching | form any secondary | with modified flowers |
| | | | inflorescences | |
| SEED | Size | Small | the seed is | Useful for making plants |
| | | | abnormally small | with smaller seeds or no |
| | | | (the percent | seeds |
| | | | difference in size | |
| | | | compared to the | |
| | | | control should be | |
| | | | noted in the | |
| | | | comments) | |
| WHOLE | Stress | C/N Content | Identify plants/seeds | Useful for making seeds |
| PLANT | | | with altered | with altered |
| | | | carbon/nitrogen | carbon/nitrogen levels |
| | | | levels | |
| INFLORESCENCE | Internode Length | Short Internode | the internode is | Useful for making shorter |
| | | | abnormally short | plants and plants with |
| | | | (the percent | modified flowers |
| | | | difference in length | |
| | | | compared to the | |
| | | | control should be | |
| | | | noted in the | |
| | | | comments) | |
| WHOLE | Dwarf | Brassino-Steroid | these plants are small | Useful for making smaller |
| PLANT | | Dwarf | in stature, dark green, | plants |
| | | | have oval leaves, | |
| | | | strong bolts, and are | |
| | | | often sterile | |
| WHOLE | Dwarf | Misc. Dwarf | these are dwarf plants | Useful for making smaller |
| PLANT | | | the do not fall under | plants |
| | | | the brassino-steroid | |
| | | | dwarf category | |
| HYPOCOTYL | Length | Short | hypocotyl is visibly | Useful for making smaller |
| | | | shorter than in wild- | plants |
| | | | type (the percent | |
| | | | difference in size | |
| | | | compared to the | |
| | | | control should be | |
| | | | noted in the | |
| | | | comments) | |
| INFLORESCENCE | Height | Short | the inflorescences of | Useful for making smaller |
| | | | the plants are | plants |
| | | | abnormally short | |
| | | | (plant height is | |
| | | | encompassed under | |
| | | | the whole plant size | |
| | | | category, but this | |
| | | | entry would be used | |
| | | | if the height of the | |
| | | | plant is abnormal, but | |
| | | | is otherwise of | |
| | | | normal size) (the | |
| | | | percent difference in | |
| | | | size | |
| WHOLE | Size | Small | plant is abnormally | Useful for making smaller |
| SEEDLING | | | small (the percent | plants |
| | | | difference in size | |
| | | | compared to the | |
| | | | control should be | |
| | | | noted in the | |
| | | | comments) | |
| ROSETTE | Petiole Length | Short Petioles | the leaf petioles are | Useful for making smaller |
| LEAVES | | | abnormally short | plants |
| | | | (the percent | |
| | | | difference in size | |
| | | | compared to the | |
| | | | control should be | |
| | | | noted in the | |
| | | | comments) | |
| WHOLE | Size | Small | plant is abnormally | Useful for making smaller |
| PLANT | | | small (the percent | plants |
| | | | difference in size | |
| | | | compared to the | |
| | | | control should be | |
| | | | noted in the | |
| | | | comments) | |
| CAULINE | Petiole Length | Short Petioles | the cauline petioles | Useful for making smaller |
| LEAVES | | | are abnormally short | plants |
| | | | (the percent | |
| | | | difference in size | |
| | | | compared to the | |
| | | | control should be | |
| | | | noted in the | |
| | | | comments) | |
| INFLORESCENCE | Strength | Strong | the primary | Useful for making |
| | | | inflorescence appears | stronger plants |
| | | | significantly stronger, | |
| | | | whether by thickness | |
| | | | or rigidity | |
| INFLORESCENCE | Strength | Weak | the primary | Useful for making |
| | | | inflorescence appears | stronger plants |
| | | | significantly weaker, | |
| | | | whether by thickness | |
| | | | or rigidity | |
| INFLORESCENCE | Inflorescence | Thickness | thickness of the | Useful for making |
| | | | primary inflorescence | stronger plants |
| HYPOCOTYL | Length | Long | hypocotyl is visibly | Useful for making taller |
| | | | longer than in wild- | plants |
| | | | type (the percent | |
| | | | difference in size | |
| | | | compared to the | |
| | | | control should be | |
| | | | noted in the | |
| | | | comments) | |
| INFLORESCENCE | Internode Length | Long Internode | the internode is | Useful for making taller |
| | | | abnormally long (the | plants and plants with |
| | | | percent difference in | longer flowers |
| | | | length compared to | |
| | | | the control should be | |
| | | | noted in the | |
| | | | comments) | |
| INFLORESCENCE | Height | Tall | the inflorescences of | Useful for making taller |
| | | | the plants are | plants and plants with |
| | | | abnormally long | longer inflorescences |
| | | | (plant height is | |
| | | | encompassed under | |
| | | | the whole plant size | |
| | | | category, but this | |
| | | | entry would be used | |
| | | | if the height of the | |
| | | | plant is abnormal, but | |
| | | | is otherwise of | |
| | | | normal size) (the | |
| | | | percent difference in | |
| | | | size | |
| SEED | Color | Dark Color | the seed is | Useful for modifying |
| | | | abnormally dark | fiber content in seed |
| SEED | Color | Light Color | the seed is | Useful for modifying |
| | | | abnormally light; | fiber content in seed |
| | | | Transparent Testa is | |
| | | | an example of this | |
| | | | phenotype | |
| SILIQUES | Shape | Bent | the silique has sharp | Useful for modifying fruit |
| | | | bend to it part of the | shape, composition and |
| | | | way down the length | seed yield |
| | | | of the silique; this | |
| | | | bend can be as much | |
| | | | as approaching 90 | |
| | | | degrees | |
| SILIQUES | Shape | Bulging | the seeds in the | Useful for modifying fruit |
| | | | silique appears | shape, composition and |
| | | | “shrink-wrapped”, | seed yield |
| | | | giving the silique a | |
| | | | bulging appearance | |
| SILIQUES | Shape | Clubbed | the silique is | Useful for modifying fruit |
| | | | somewhat bulbous at | shape, composition and |
| | | | its terminal end | seed yield |
| SILIQUES | Shape | Sickle | the silique is curved, | Useful for modifying fruit |
| | | | much like the blade | shape, composition and |
| | | | of a sickle | seed yield |
| INFLORESCENCE | Branching | No Branching | there is no branching | Useful for modifying |
| | | | at all | plant architecture, ie |
| | | | | amount of branching |
| INFLORESCENCE | Branching | Horizontal | new branches arise at | Useful for modifying |
| | | Branching | a 90 degree angle | plant architecture, ie |
| | | | from the bolt they are | branch angle |
| | | | emerging from | |
| COTYLEDONS | Horizontally | Horizontally | cotyledon is visibly | Useful for modifying |
| | Oblong | Oblong | wider than it is long, | plant architecture, ie leaf |
| | | | and it is also | structure |
| | | | symmetrical (or very | |
| | | | close to it) when cut | |
| | | | along its horizontal | |
| | | | axis | |
| INFLORESCENCE | Branching | Two Leaf | two cauline leaves | Useful for modifying |
| | | Branching | subtend branches | plant architecture, ie |
| | | | instead of one | reducing foliage |
| INFLORESCENCE | Branching | Reduced Apical | the dominance of the | Useful for modifying |
| | | Dominance | primary inflorescence | plant structure, ie |
| | | | is diminished, with | increased branching |
| | | | the secondaries | |
| | | | appearing as | |
| | | | dominant or nearly as | |
| | | | dominant | |
| SEED | Seed | Stacked | the seeds/embryos | Useful for modifying seed |
| | Arrangement | Arrangement | are stacked one on | content |
| | | | top of the other | |
| | | | within the silique, | |
| | | | instead of having the | |
| | | | usual side-by-side | |
| | | | distribution | |
| SEED | Other | Other | this correlates with | Useful for modifying seed |
| | | | any seed mutant | content |
| | | | phenotypes which do | |
| | | | not fit into the above | |
| | | | categories (a picture | |
| | | | should be taken for | |
| | | | documentation) | |
| SEED | Shape | Oval Shape | the seeds are much | Useful for modifying seed |
| | | | more rounded on the | structure and composition |
| | | | ends, giving the seed | |
| | | | a true oval | |
| | | | appearance | |
| SEED | Shape | Ridged Shape | the seeds have small | Useful for modifying seed |
| | | | ridges or bumps on | structure and composition |
| | | | them | |
| SEED | Shape | Tapered Shape | the ends of the seeds | Useful for modifying seed |
| | | | narrow down to a | structure and composition |
| | | | much sharper point | |
| | | | than usual | |
| COTYLEDONS | Cotyledon | Single Cotyledon | Only one cotyledon | Useful for modifying seed |
| | Number | | appears after | structure and content |
| | | | germination; This is | |
| | | | simply one cotyledon | |
| | | | that had formed | |
| | | | instead of two, and is | |
| | | | not related to the | |
| | | | fused phenotype; | |
| | | | With this exception, | |
| | | | the plant is often | |
| | | | otherwise wild-type | |
| | | | in appearance | |
| COTYLEDONS | Cotyledon | Tricot | three cotyledons | Useful for modifying seed |
| | Number | | emerge instead of | structure and content |
| | | | two; With this | |
| | | | exception, the plant is | |
| | | | often otherwise wild- | |
| | | | type in appearance | |
| COTYLEDONS | Curled | Cup-shaped | cotyledons are curled | Useful for modifying seed |
| | | | up at the cotyledon | structure and content |
| | | | margins such that | |
| | | | they form a cup or | |
| | | | bowl-like shape | |
| COTYLEDONS | Curled | Curled 1 | cotyledons are | Useful for modifying seed |
| | | | abnormally curled | structure and content |
| | | | slightly up or down at | |
| | | | he cotyledon | |
| | | | margins, but do not | |
| | | | fall under the “cup- | |
| | | | shaped” description | |
| | | | (least severe type) | |
| COTYLEDONS | Curled | Curled 2 | cotyledons are | Useful for modifying seed |
| | | | abnormally curled up | structure and content |
| | | | or down at the | |
| | | | cotyledon margins, | |
| | | | but do not fall under | |
| | | | the “cup-shaped” | |
| | | | description (more | |
| | | | severe than Curled 1, | |
| | | | but less severe than | |
| | | | Curled 3) | |
| COTYLEDONS | Curled | Curled 3 | cotyledons are | Useful for modifying seed |
| | | | abnormally curled up | structure and content |
| | | | or down at the | |
| | | | cotyledon margins, | |
| | | | but do not fall under | |
| | | | the “cup-shaped” | |
| | | | description (more | |
| | | | severe than Curled 2, | |
| | | | but less severe than | |
| | | | Curled 4) | |
| COTYLEDONS | Curled | Curled 4 | cotyledons are | Useful for modifying seed |
| | | | abnormally | structure and content |
| | | | curled/rolled up or | |
| | | | down at the | |
| | | | cotyledon margins | |
| | | | (more severe than | |
| | | | Curled 3, but less | |
| | | | severe than Curled 5) | |
| COTYLEDONS | Curled | Curled 5 | cotyledons are | Useful for modifying seed |
| | | | completely | structure and content |
| | | | curled/rolled up or | |
| | | | down at the | |
| | | | cotyledon margins | |
| | | | (most severe type) | |
| COTYLEDONS | Dimorphic | Dimorphic | one cotyledon is | Useful for modifying seed |
| | Cotyledons | Cotyledons | significantly larger | structure and content |
| | | | than the other | |
| COTYLEDONS | Fused | Fused 1 | cotyledons are fused | Useful for modifying seed |
| | | | to each other, | structure and content |
| | | | creating one | |
| | | | cotyledon structure | |
| | | | (least severe type) | |
| COTYLEDONS | Fused | Fused 2 | cotyledons are fused | Useful for modifying seed |
| | | | to each other, | structure and content |
| | | | creating one | |
| | | | cotyledon structure | |
| | | | (more severe than | |
| | | | Fused 1, but less | |
| | | | severe than Fused 3) | |
| COTYLEDONS | Fused | Fused 3 | cotyledons are fused | Useful for modifying seed |
| | | | to each other, | structure and content |
| | | | creating one | |
| | | | cotyledon structure | |
| | | | (more severe than | |
| | | | Fused 2, but less | |
| | | | severe than Fused 4) | |
| COTYLEDONS | Fused | Fused 4 | cotyledons are fused | Useful for modifying seed |
| | | | to each other, | structure and content |
| | | | creating one | |
| | | | cotyledon structure | |
| | | | (more severe than | |
| | | | Fused 3, but less | |
| | | | severe than Fused 5) | |
| COTYLEDONS | Fused | Fused 5 | cotyledons are fused | Useful for modifying seed |
| | | | to each other, | structure and content |
| | | | creating one | |
| | | | cotyledon structure | |
| | | | (most severe type) | |
| COTYLEDONS | Other | Other | this correlates with | Useful for modifying seed |
| | | | any cotyledon mutant | structure and content |
| | | | phenotypes which do | |
| | | | not fit into the above | |
| | | | categories (a picture | |
| | | | should be taken for | |
| | | | documentation) | |
| ROSETTE | Fused | Leaf Fused to | the leaf is fused to | Useful for plants with |
| LEAVES | | Leaf | itself or another leaf | fused leaves eg |
| | | | | ornamentals |
| COTYLEDONS | Petiole Length | Short Petioles | the cotyledon petioles | Useful for shade |
| | | | are abnormally short | avoidance and for making |
| | | | (the percent | smaller plants |
| | | | difference in size | |
| | | | compared to the | |
| | | | control should be | |
| | | | noted in the | |
| | | | comments) | |
| PRIMARY | Agravitropic | Agravitropic | the primary root does | |
| ROOT | | | not appear to have a | |
| | | | gravitropic response | |
| PRIMARY | Kinked | Kinked | there is a sharp bend | |
| ROOT | | | in the root | |
| ROSETTE | Rosette Diameter | Diameter | diameter of rosette | |
| LEAVES | | | | |
| WHOLE | Plant Weight | Plant Weight | weight of whole plant | |
| PLANT | | | | |
| WHOLE | Plant Height | Height | height of whole plant | |
| PLANT | | | | |
| WHOLE | Plant DTH | Dth | days to harvest of | |
| PLANT | | | plant | |
| WHOLE | Plant Harvest | Harvest Index | harvest index of plant | — |
| PLANT | Index | | | |
| CAULINE | Fused | Leaf Fused to | the cauline leaf is | |
| LEAVES | | Petiole | fused to its petiole | |
| N/A | N/A | N/A | N/A | |
| WHOLE | HERBICIDE | HERBICIDE | herbicide segregation | |
| PLANT | SEGREGATION | SEGREGATION | ratio | |
| WHOLE | N/A | No Mutant | The plants were | |
| PLANT | | Phenotype | screened at all | |
| | | Observed | appropriate stages | |
| | | | and showed no | |
| | | | mutant phenotype, | |
| | | | i.e., they looked like | |
| | | | normal, wild type | |
| | | | Arabidopsis plants | |

[0120] From the results reported in Table 1 and the Sequence Listing, it can be seen that the nucleotides/polypeptides of the inventions are useful, depending upon the respective individual sequence, to make plants with modified growth and phenotype characteristics, including:
[0121] 1. modulated plant size, including increased and decreased height or length;
[0122] 2. modulated vegetative growth (increased or decreased);
[0123] 3. modulated organ number;
[0124] 4. increased biomass;
[0125] 5. sterility;
[0126] 6. seedling lethality;
[0127] 7. accelerated crop development or harvest;
[0128] 8. accelerated flowering time;
[0129] 9. delayed flowering time;
[0130] 10. delayed senescence;
[0131] 11. enhanced drought or stress tolerance;
[0132] 12. increased chlorophyll and photosynthetic capacity;
[0133] 13. increased anthocyanin content;
[0134] 14. increased root growth, and increased nutrient uptake;
[0135] 15. increased or decreased seed weight or size, increased seed carbon or nitrogen content;
[0136] 16. modified, including increased, seed/fruit yield or modified fruit content;
[0137] 17. enhanced foliage;
[0138] 18. usefulness for making nutratceuticals/pharmaceuticals in plants;
[0139] 19. plant lethality;
[0140] 20. decrease seed fiber content to provide increased digestability;
[0141] 21. modified ornamental appearance with modified leaves, flowers, color or foliage;
[0142] 22. modified sterility in plants;
[0143] 23. enhanced ability to grow in shade;
[0144] 24. enhanced biotic stress tolerance;
[0145] 25. increased tolerance to density and low fertilizer;
[0146] 26. enhanced tolerance to high or low pH, to low or high nitrogen or phosphate;
[0147] 27. enhanced tolerance to oxidative stress;
[0148] 28. enhanced chemical composition;
[0149] 29. altered leaf shape;
[0150] 30. enhanced abiotic stress tolerance;
[0151] 31. increased tolerance to cold stress;
[0152] 32. increased starch content;
[0153] 33. reduced number or no seeds;
[0154] 34. enhanced plant strength;
[0155] 35. modified flower length;
[0156] 36. longer inflorescences;
[0157] 37. modified seed fiber content;
[0158] 38. modified fruit shape;
[0159] 39. modified fruit composition;
[0160] 40. modified seed yield;
[0161] 41. modified plant architecture, such as modified amount or angle of branching, modified leaf structure, or modified seed structure; and
[0162] 42. enhanced shade avoidance.

[0163] According to another aspect, the nucleotide sequences of the invention encode polypeptides that can be utilized as herbicide targets, those useful in the screening of new herbicide compounds. Thus, the proteins encoded by the nucleotide sequences provide the bases for assays designed to easily and rapidly identify novel herbicides.

[0164] According to yet another aspect, the present invention provides a method of identifying a herbicidal compound, comprising: (a) combining a polypeptide comprising an amino acid sequence at least 85% identical to an amino acid sequence selected from the group consisting of the polypeptides described in FIGS. 1-73 with a compound to be tested for the ability to inhibit the activity of said polypeptide, under conditions conducive to inhibition; (b) selecting a compound identified in (a) that inhibits the activity of said polypeptide; (c) applying a compound selected in (b) to a plant to test for herbicidal activity; (d) selecting a compound identified in (c) that has herbicidal activity. The polypeptide can alternatively comprise an amino acid sequence at least 90%, or at least 95%, or at least 99% identical to an amino acid sequence selected from the group consisting of the polypeptides in FIGS. 1-73. The present invention also provides a method for killing or inhibiting the growth or viability of a plant, comprising applying to the plant a herbicidal compound identified according to this method.

Determination of Functional Homolog Sequences

[0165] The “Lead” sequences described in the Sequence Listing **-** and identified in FIGS. 1-73 with a Lead number, *** are utilized to identify functional homologs of the lead sequences and, together with those sequences, are utilized to determine a consensus sequence for a given group of lead and functional homolog sequences.

[0166] A subject sequence is considered a functional homolog of a query sequence if the subject and query sequences encode proteins having a similar function and/or activity. A process known as Reciprocal BLAST (Rivera et al, Proc. Natl Acad. Sci. USA, 1998, 95:6239-6244) is used to identify potential functional homolog sequences from databases consisting of all available public and proprietary peptide sequences, including NR from NCBI and peptide translations from Ceres clones.

[0167] Before starting a Reciprocal BLAST process, a specific query polypeptide is searched against all peptides from its source species using BLAST in order to identify polypeptides having sequence identity of 80% or greater to the query polypeptide and an alignment length of 85% or greater along the shorter sequence in the alignment. The query polypeptide and any of the aforementioned identified polypeptides are designated as a cluster.

[0168] The main Reciprocal BLAST process consists of two rounds of BLAST searches; forward search and reverse search. In the forward search step, a query polypeptide sequence, “polypeptide A,” from source species S^{A} is BLASTed against all protein sequences from a species of interest. Top hits are determined using an E-value cutoff of 10⁻⁵ and an identity cutoff of 35%. Among the top hits, the sequence having the lowest E-value is designated as the best hit, and considered a potential functional homolog. Any other top hit that had a sequence identity of 80% or greater to the best hit or to the original query polypeptide is considered a potential functional homolog as well. This process is repeated for all species of interest.

[0169] In the reverse search round, the top hits identified in the forward search from all species are used to perform a BLAST search against all protein or polypeptide sequences from the source species S^{A}. A top hit from the forward search that returned a polypeptide from the aforementioned cluster as its best hit is also considered as a potential functional homolog.

[0170] Functional homologs are identified by manual inspection of potential functional homolog sequences. Representative functional homologs are shown in FIGS. 1-5. Each Figure represents a grouping of a lead/query sequence aligned with the corresponding identified functional homolog subject sequences. Lead sequences and their corresponding functional homolog sequences are aligned to identify conserved amino acids and to determine a consensus sequence that contains a frequently occurring amino acid residue at particular positions in the aligned sequences, as shown in FIGS. 1-73.

[0171] Each consensus sequence then is comprised of the identified and numbered conserved regions or domains, with some of the conserved regions being separated by one or more amino acid residues, represented by a dash (-), between conserved regions.

[0172] Useful polypeptides of the inventions, therefore, include each of the lead and functional homolog sequences shown in FIGS. 1-73, as well as the consensus sequences shown in those Figures. The invention also encompasses other useful polypeptides constructed based upon the consensus sequence and the identified conserved regions. Thus, useful polypeptides include those which comprise one or more of the numbered conserved regions in each alignment table in an individual Figure depicted in FIGS. 1-73, wherein the conserved regions may be separated by dashes. Useful polypeptides also include those which comprise all of the numbered conserved regions in an individual alignment table selected from FIGS. 1-73, alternatively comprising all of the numbered conserved regions in an individual alignment table and in the order as depicted in an individual alignment table selected from FIGS. 1-73. Useful polypeptides also include those which comprise all of the numbered conserved regions in an individual alignment table and in the order as depicted in an individual alignment table selected from FIGS. 1-73, wherein the conserved regions are separated by dashes, wherein each dash between two adjacent conserved regions is comprised of the amino acids depicted in the alignment table for lead and/or functional homolog sequences at the positions which define the particular dash. Such dashes in the consensus sequence can be of a length ranging from length of the smallest number of dashes in one of the aligned sequences up to the length of the highest number of dashes in one of the aligned sequences.

[0173] Such useful polypeptides can also have a length (a total number of amino acid residues) equal to the length identified for a consensus sequence or of a length ranging from the shortest to the longest sequence in any given family of lead and functional homolog sequences identified in an individual alignment table selected from FIGS. 1-73.

[0174] The Sequence Listing sets forth the polypeptide and polynucleotide sequences of the invention, including the Lead, ortholog and consensus sequences presented in FIGS. 1-73.

[0175] Table 2 correlates the sequences in the Sequence Listing with those shown in the alignment tables of FIGS. 1-73. As noted above, each Figure represents the alignment table for a particular “Lead” sequence and shows the group of functional homologs for that “Lead” sequence. Some identified homologs are not presented in the Figures but are listed in the Sequence Listing. So Table 2 also groups together the functional homologs by correlating each homolog with the relevant “Lead” sequence (referred to in Table 2 as the “query identifier”) and the table also presents other information for each of the functional homologs, including the % identity of the homolog relative to the query/Lead sequence, the corresponding E-value, the plant species for the homolog, the Sequence ID No. in the Sequence Listing, and an indication of whether or not the sequence is presented in the corresponding alignment table in one of the Figures.

[0176] The present invention further encompasses nucleotides that encode the above described polypeptides, as well as the complements thereof, and including alternatives thereof based upon the degeneracy of the genetic code.

[0177] The invention being thus described, it will be apparent to one of ordinary skill in the art that various modifications of the materials and methods for practicing the invention can be made. Such modifications are to be considered within the scope of the invention as defined by the following claims.

[0178] Each of the references from the patent and periodical literature cited herein is hereby expressly incorporated in its entirety by such citation.

TABLE 2

| | | | | | | IN |
|---|---|---|---|---|---|---|
| LEAD | FUNCTIONAL | PERCENT | | | SEQ ID | ALIGNMENT |
| SEQ ID | HOMOLOG ID | IDENTITY | E-VALUE | SPECIES | NO | TABLE |
| 12321246 | 1442604 | 54.57 | 7.5E−127 | Populus balsamifera subsp. trichocarpa | 83 | YES |
| 12321246 | 1442608 | 51.10 | 2.2E−113 | Populus balsamifera subsp. trichocarpa | 85 | NO |
| 12321246 | 1452827 | 50.63 | 2.6E−124 | Populus balsamifera subsp. trichocarpa | 87 | NO |
| 12321246 | 1442612 | 50.00 | 1.8E−116 | Populus balsamifera subsp. trichocarpa | 89 | NO |
| 12321246 | 522267 | 47.27 | 1.8E−119 | Glycine max | 90 | YES |
| 12321246 | 474116 | 47.57 | 1.3E−111 | Glycine max | 91 | NO |
| 12330770 | 151087 | 100.00 | 0 | Arabidopsis thaliana | 92 | NO |
| 12330770 | 1504145 | 67.40 | 3.3E−133 | Populus balsamifera subsp. trichocarpa | 96 | YES |
| 12330770 | 1005083 | 62.85 | 0 | Triticum aestivum | 97 | YES |
| 12330770 | 50910970 | 63.61 | 1.1E−130 | Oryza sativa subsp. japonica | 98 | YES |
| 12330770 | 337070 | 60.42 | 2E−122 | Zea mays | 99 | YES |
| 12330770 | 1504146 | 58.55 | 1.1E−88 | Populus balsamifera subsp. trichocarpa | 101 | NO |
| 23363031 | 1480518 | 96.82 | 1.2E−199 | Populus balsamifera subsp. trichocarpa | 105 | YES |
| 23363031 | 1039306 | 96.57 | 0 | Brassica napus | 106 | YES |
| 23363031 | 581299 | 96.56 | 1.5E−199 | Glycine max | 107 | YES |
| 7090414 | 21436457 | 90.88 | 1.1E−167 | Arabidopsis thaliana | 114 | NO |
| 7090414 | 1346028 | 81.18 | 4.4E−153 | Lupinus albus | 115 | YES |
| 7090414 | 20135548 | 81.18 | 4.4E−153 | Malus x domestica | 116 | YES |
| 7090414 | 34013692 | 80.29 | 1.8E−149 | Hevea brasiliensis | 117 | YES |
| 7090414 | 1346029 | 80.00 | 1.5E−150 | Lupinus albus | 118 | NO |
| 7090414 | 62199628 | 79.41 | 3.8E−147 | Vitis vinifera | 119 | YES |
| 12676463 | 58397752 | 51.33 | 8.5E−28 | Teucrium chamaedrys | 122 | NO |
| 12676463 | 3582021 | 46.31 | 2.7E−113 | Nepeta racemosa | 123 | YES |
| 12676463 | 46947673 | 46.04 | 8.5E−103 | Ammi majus | 124 | YES |
| 12676463 | 117188 | 45.95 | 2.3E−107 | Persea americana | 125 | NO |
| 12676463 | 34904242 | 45.58 | 2.1E−99 | Oryza sativa subsp. japonica | 126 | YES |
| 12676463 | 921721 | 45.25 | 4.7E−102 | Triticum aestivum | 127 | NO |
| 12676463 | 703961 | 45.25 | 4.7E−102 | Triticum aestivum | 128 | YES |
| 12676463 | 25282608 | 45.25 | 2.8E−111 | Persea americana | 129 | YES |
| 36531424 | 79501393 | 80.95 | 2.1E−218 | Arabidopsis thaliana | 153 | NO |
| 36531424 | 1509745 | 57.33 | 3.6E−143 | Populus balsamifera subsp. trichocarpa | 155 | YES |
| 36531424 | 1456553 | 56.31 | 2.7E−147 | Populus balsamifera subsp. trichocarpa | 157 | NO |
| 36531424 | 365873 | 49.13 | 1.7E−113 | Zea mays | 158 | YES |
| 36531424 | 511739 | 48.80 | 2.6E−117 | Glycine max | 159 | YES |
| 36531424 | 770598 | 47.90 | 1.5E−123 | Triticum aestivum | 160 | YES |
| 36531424 | 1450731 | 46.68 | 2.2E−120 | Populus balsamifera subsp. trichocarpa | 162 | NO |
| 36531424 | 34906258 | 45.06 | 3.2E−105 | Oryza sativa subsp. japonica | 163 | YES |
| 12718491 | 1443044 | 67.12 | 5.5E−163 | Populus balsamifera subsp. trichocarpa | 167 | YES |
| 12718491 | 64180315 | 41.47 | 3E−92 | Taxus cuspidata | 168 | YES |
| 12718491 | 53759170 | 41.47 | 8.9E−92 | Taxus chinensis | 169 | NO |
| 12718491 | 60459952 | 39.57 | 1.4E−86 | Taxus x media | 170 | YES |
| 12718491 | 38481843 | 35.64 | 6.8E−83 | Taxus chinensis | 171 | NO |
| 12718491 | 67633430 | 39.10 | 9.4E−80 | Taxus canadensis | 172 | YES |
| 12718491 | 34559857 | 34.78 | 3.7E−82 | Taxus cuspidata | 173 | NO |
| 12718491 | 59800276 | 38.46 | 8.2E−81 | Picea sitchensis | 174 | NO |
| 12718491 | 59800274 | 38.25 | 5E−81 | Picea sitchensis | 175 | YES |
| 12718491 | 50937811 | 33.62 | 2E−74 | Oryza sativa subsp. japonica | 176 | YES |
| 12718491 | 63108254 | 35.20 | 3.4E−15 | Eschscholzia californica | 177 | NO |
| 12718491 | 45260636 | 31.91 | 6.5E−62 | Nicotiana tabacum | 178 | NO |
| 12370997 | 1471370 | 76.61 | 8.7E−181 | Populus balsamifera subsp. trichocarpa | 182 | NO |
| 12370997 | 1444471 | 74.24 | 1E−193 | Populus balsamifera subsp. trichocarpa | 184 | YES |
| 12370997 | 1438451 | 73.32 | 6.3E−178 | Populus balsamifera subsp. trichocarpa | 185 | NO |
| 12370997 | 1438451 | 73.32 | 6.3E−178 | Populus balsamifera subsp. trichocarpa | 186 | NO |
| 12370997 | 1447690 | 72.17 | 5.8E−175 | Populus balsamifera subsp. trichocarpa | 188 | NO |
| 12370997 | 1491278 | 71.46 | 7.3E−184 | Populus balsamifera subsp. trichocarpa | 190 | NO |
| 12370997 | 624225 | 68.64 | 0 | Glycine max | 191 | NO |
| 12370997 | 2739008 | 67.24 | 0 | Glycine max | 192 | YES |
| 12370997 | 779234 | 65.34 | 0 | Triticum aestivum | 193 | YES |
| 12370997 | 50948231 | 63.20 | 0 | Oryza sativa subsp. japonica | 194 | YES |
| 12370997 | 50725143 | 62.81 | 0 | Oryza sativa subsp. japonica | 195 | NO |
| 12370997 | 1551657 | 62.60 | 5.7E−160 | Zea mays | 196 | NO |
| 12370997 | 1601442 | 55.71 | 9.7E−28 | Zea mays | 197 | NO |
| 12370997 | 1600726 | 56.51 | 4.3E−76 | Zea mays | 198 | YES |
| 12370997 | 5921925 | 56.50 | 0 | Pinus radiata | 199 | YES |
| 12370997 | 22758273 | 56.35 | 0 | Oryza sativa subsp. japonica | 200 | NO |
| 12558789 | 68164961 | 87.48 | 2.7E−241 | Malus x domestica | 203 | YES |
| 12558789 | 1470719 | 87.27 | 1.5E−206 | Populus balsamifera subsp. trichocarpa | 205 | YES |
| 12558789 | 1479959 | 87.24 | 6.6E−206 | Populus balsamifera subsp. trichocarpa | 207 | NO |
| 12558789 | 1543728 | 87.04 | 5.2E−206 | Populus balsamifera subsp. trichocarpa | 209 | NO |
| 12558789 | 16555877 | 86.73 | 0 | Lithospermum erythrorhizon | 210 | YES |
| 12575176 | 1444156 | 52.00 | 1.5E−112 | Populus balsamifera subsp. trichocarpa | 228 | YES |
| 12575176 | 1444154 | 51.76 | 1.2E−110 | Populus balsamifera subsp. trichocarpa | 230 | NO |
| 12575176 | 1497097 | 51.52 | 1.6E−110 | Populus balsamifera subsp. trichocarpa | 232 | NO |
| 12660455 | 1525729 | 74.13 | 5.7E−177 | Populus balsamifera subsp. trichocarpa | 255 | NO |
| 12660455 | 1470773 | 70.47 | 2.6E−158 | Populus balsamifera subsp. trichocarpa | 257 | NO |
| 12660455 | 1524187 | 70.40 | 1.9E−169 | Populus balsamifera subsp. trichocarpa | 259 | YES |
| 12660455 | 11934677 | 63.80 | 0 | Cucurbita maxima | 260 | YES |
| 12660455 | 27764531 | 63.99 | 0 | Pisum sativum | 261 | YES |
| 12660455 | 13022042 | 57.26 | 0 | Hordeum vulgare subsp. vulgare | 262 | YES |
| 12660455 | 703821 | 39.69 | 3.4E−33 | Triticum aestivum | 263 | YES |
| 12660455 | 47498770 | 54.89 | 0 | Ginkgo biloba | 264 | YES |
| 12660455 | 391105 | 53.78 | 0 | Zea mays | 265 | YES |
| 12660455 | 5915847 | 53.78 | 0 | Zea mays | 266 | NO |
| 12605081 | 1453454 | 84.96 | 5E−169 | Populus balsamifera subsp. trichocarpa | 270 | YES |
| 12605081 | 473273 | 79.72 | 0 | Glycine max | 271 | YES |
| 12605081 | 2738998 | 80.36 | 0 | Glycine max | 272 | YES |
| 12605081 | 22651519 | 78.74 | 0 | Ocimum basilicum | 273 | YES |
| 12605081 | 1528108 | 79.11 | 2.3E−157 | Populus balsamifera subsp. trichocarpa | 275 | NO |
| 12605081 | 1474685 | 79.11 | 1.2E−153 | Populus balsamifera subsp. trichocarpa | 276 | NO |
| 12605081 | 22651521 | 78.54 | 0 | Ocimum basilicum | 278 | YES |
| 12605081 | 46947675 | 75.59 | 0 | Ammi majus | 279 | YES |
| 12654761 | 1457794 | 48.84 | 1.3E−124 | Populus balsamifera subsp. trichocarpa | 283 | YES |
| 12654761 | 1548098 | 47.72 | 4.2E−117 | Zea mays | 284 | YES |
| 12654761 | 77552864 | 46.71 | 1.3E−120 | Oryza sativa subsp. japonica | 285 | YES |
| 12654761 | 50940049 | 45.36 | 3.2E−108 | Oryza sativa subsp. japonica | 286 | NO |
| 12654761 | 13661758 | 42.05 | 6.2E−105 | Lolium rigidum | 287 | NO |
| 12654761 | 13661756 | 42.58 | 3.7E−107 | Lolium rigidum | 288 | YES |
| 12654761 | 1463878 | 44.25 | 9.8E−86 | Populus balsamifera subsp. trichocarpa | 290 | NO |
| 12654761 | 818090 | 34.65 | 2.3E−11 | Triticum aestivum | 291 | YES |
| 12654761 | 57863822 | 42.67 | 2.7E−106 | Oryza sativa subsp. japonica | 292 | NO |
| 12724226 | 1510416 | 82.29 | 7E−195 | Populus balsamifera subsp. trichocarpa | 296 | YES |
| 12724226 | 1541253 | 79.48 | 6.1E−196 | Populus balsamifera subsp. trichocarpa | 298 | NO |
| 12724226 | 71834076 | 74.11 | 1.3E−185 | Zinnia elegans | 299 | YES |
| 12724226 | 60677681 | 73.89 | 0 | Oryza sativa subsp. japonica | 300 | YES |
| 12724226 | 34902330 | 69.31 | 0 | Oryza sativa subsp. japonica | 301 | NO |
| 12724226 | 1578373 | 73.72 | 0 | Zea mays | 302 | YES |
| 12724226 | 1583137 | 73.39 | 0 | Zea mays | 303 | NO |
| 12724226 | 50058152 | 45.96 | 1.9E−101 | Oryza sativa subsp. japonica | 304 | NO |
| 12724226 | 390429 | 44.21 | 2E−99 | Zea mays | 305 | NO |
| 12724226 | 234510 | 44.73 | 8.6E−99 | Zea mays | 306 | NO |
| 12724226 | 1472214 | 46.47 | 4.7E−102 | Populus balsamifera subsp. trichocarpa | 308 | NO |
| 12724226 | 690176 | 43.95 | 9.9E−98 | Glycine max | 309 | YES |
| 12724226 | 45260636 | 42.86 | 5.8E−93 | Nicotiana tabacum | 310 | YES |
| 13499809 | 21388658 | 54.24 | 3.3E−07 | Physcomitrella patens | 313 | NO |
| 13499809 | 4704605 | 52.63 | 2.6E−07 | Picea glauca | 314 | NO |
| 13499809 | 10799202 | 50.67 | 5.2E−09 | Sorghum bicolor | 315 | NO |
| 13499809 | 1605245 | 50.67 | 8.8E−07 | Parthenium argentatum | 316 | NO |
| 13499809 | 9957568 | 50.00 | 9.7E−08 | Capsella bursa-pastoris | 317 | NO |
| 12323989 | 1493656 | 61.83 | 8.4E−72 | Zea mays | 324 | NO |
| 12323989 | 50942745 | 55.70 | 5E−70 | Oryza sativa subsp. japonica | 325 | YES |
| 12323989 | 938587 | 37.50 | 1.5E−10 | Triticum aestivum | 326 | YES |
| 12323989 | 328171 | 49.80 | 1.2E−51 | Zea mays | 327 | YES |
| 11407753 | 746644 | 55.88 | 6.5E−36 | Triticum aestivum | 330 | YES |
| 11407753 | 56126414 | 52.80 | 3.3E−38 | Euphorbia esula | 331 | YES |
| 11407753 | 1644686 | 50.56 | 4.4E−36 | Glycine max | 332 | YES |
| 11407753 | 23899378 | 47.46 | 3.9E−35 | Lycopersicon esculentum | 333 | YES |
| 11407753 | 311199 | 46.58 | 4.6E−24 | Zea mays | 334 | YES |
| 11407753 | 359810 | 44.44 | 2.9E−23 | Zea mays | 335 | NO |
| 11407753 | 1476453 | 40.00 | 2.2E−10 | Populus balsamifera subsp. trichocarpa | 337 | NO |
| 11407753 | 70906129 | 38.46 | 2.1E−18 | Medicago truncatula | 338 | YES |
| 11407753 | 31432625 | 37.77 | 7.8E−21 | Oryza sativa subsp. japonica | 339 | NO |
| 4927725 | 37907 | 90.22 | 1.6E−157 | Arabidopsis thaliana | 344 | NO |
| 4927725 | 20465357 | 87.67 | 4.5E−176 | Arabidopsis thaliana | 345 | NO |
| 4927725 | 21593306 | 87.64 | 1.4E−174 | Arabidopsis thaliana | 346 | NO |
| 4927725 | 5139329 | 87.64 | 1.7E−174 | Arabidopsis thaliana | 347 | NO |
| 4927725 | 1213069 | 84.62 | 2E−157 | Nicotiana tabacum | 348 | YES |
| 4927725 | 14575543 | 84.42 | 1.4E−142 | Nicotiana sylvestris | 349 | YES |
| 4927725 | 1524384 | 82.78 | 1.4E−139 | Populus balsamifera subsp. trichocarpa | 351 | YES |
| 4927725 | 1470977 | 81.96 | 1.5E−144 | Populus balsamifera subsp. trichocarpa | 353 | NO |
| 4927725 | 1043166 | 81.07 | 6.6E−143 | Glycine max | 354 | YES |
| 11014624 | 8439547 | 83.67 | 7.7E−220 | Solanum tuberosum | 357 | YES |
| 11014624 | 1199827 | 82.86 | 1.4E−218 | Arabidopsis thaliana | 358 | NO |
| 11014624 | 1448917 | 82.86 | 1.4E−218 | Arabidopsis thaliana | 359 | NO |
| 11014624 | 4914408 | 82.86 | 1.4E−218 | Arabidopsis thaliana | 360 | NO |
| 11014624 | 42573081 | 82.86 | 1.4E−218 | Arabidopsis thaliana | 361 | NO |
| 11014624 | 578495 | 78.70 | 9.5E−206 | Glycine max | 362 | YES |
| 11014624 | 280346 | 74.65 | 5.3E−196 | Zea mays | 363 | YES |
| 11014624 | 34911416 | 74.35 | 2.7E−192 | Oryza sativa subsp. japonica | 364 | YES |
| 4987967 | 1460794 | 89.25 | 4.8E−189 | Populus balsamifera subsp. trichocarpa | 368 | NO |
| 4987967 | 1450365 | 88.97 | 3.2E−192 | Populus balsamifera subsp. trichocarpa | 370 | YES |
| 4987967 | 593648 | 82.38 | 5.8E−206 | Glycine max | 371 | YES |
| 4987967 | 237870 | 79.52 | 3.8E−186 | Zea mays | 372 | NO |
| 4987967 | 1378809 | 75.81 | 5.3E−189 | Zea mays | 373 | YES |
| 4987967 | 697349 | 74.11 | 6.5E−191 | Triticum aestivum | 374 | YES |
| 4987967 | 50907773 | 72.92 | 9.9E−188 | Oryza sativa subsp. japonica | 375 | YES |
| 3039543 | 17815 | 93.98 | 1.4E−252 | Brassica napus | 378 | YES |
| 3039543 | 46095337 | 93.57 | 1E−249 | Brassica rapa | 379 | YES |
| 3039543 | 18251236 | 93.24 | 5.1E−255 | Orychophragmus violaceus | 380 | YES |
| 3039543 | 48526086 | 83.55 | 7.9E−202 | Conyza canadensis | 381 | YES |
| 7090814 | 15825883 | 97.12 | 5.1E−255 | Arabidopsis thaliana | 384 | NO |
| 7090814 | 8439547 | 84.48 | 2.3E−227 | Solanum tuberosum | 385 | YES |
| 7090814 | 578495 | 82.95 | 2.3E−211 | Glycine max | 386 | YES |
| 7090814 | 1187996 | 82.86 | 1.4E−218 | Arabidopsis thaliana | 387 | NO |
| 7090814 | 20466326 | 82.86 | 1.4E−218 | Arabidopsis thaliana | 388 | NO |
| 7090814 | 280346 | 78.80 | 1.1E−197 | Zea mays | 389 | YES |
| 7090814 | 50932643 | 77.55 | 4.1E−198 | Oryza sativa subsp. japonica | 390 | YES |
| 7094546 | 1496106 | 74.25 | 1.1E−178 | Populus balsamifera subsp. trichocarpa | 394 | NO |
| 7094546 | 1505326 | 74.05 | 3E−194 | Populus balsamifera subsp. trichocarpa | 396 | YES |
| 7094546 | 49035694 | 70.99 | 3.5E−176 | Medicago truncatula | 397 | YES |
| 7094546 | 15485155 | 56.09 | 1.7E−128 | Brassica juncea | 398 | YES |
| 7094546 | 25956262 | 54.50 | 5.8E−135 | Cucumis sativus | 399 | YES |
| 7094546 | 15485153 | 54.48 | 2.2E−126 | Brassica juncea | 400 | NO |
| 7094546 | 50912665 | 54.36 | 4.6E−126 | Oryza sativa subsp. japonica | 401 | YES |
| 7094546 | 12331173 | 54.35 | 4.5E−128 | Brassica juncea | 402 | NO |
| 12336276 | 34365731 | 83.00 | 0 | Arabidopsis thaliana | 407 | NO |
| 12336276 | 34903888 | 61.52 | 0 | Oryza sativa subsp. japonica | 408 | YES |
| 12336276 | 34903880 | 59.55 | 0 | Oryza sativa subsp. japonica | 409 | NO |
| 12336276 | 820398 | 54.74 | 2E−22 | Triticum aestivum | 410 | YES |
| 12336276 | 34903874 | 58.33 | 0 | Oryza sativa subsp. japonica | 411 | NO |
| 12336276 | 34903876 | 58.52 | 0 | Oryza sativa subsp. japonica | 412 | NO |
| 12336276 | 779326 | 57.55 | 0 | Triticum aestivum | 413 | NO |
| 1807504 | 14719883 | 73.62 | 9.8E−117 | Medicago truncatula | 418 | YES |
| 1807504 | 45504723 | 73.22 | 3E−131 | Nicotiana tabacum | 419 | YES |
| 1807504 | 9972157 | 73.18 | 2.3E−124 | Pisum sativum | 420 | YES |
| 1807504 | 5230656 | 71.67 | 3.4E−130 | Lycopersicon esculentum | 421 | YES |
| 1807504 | 60476424 | 70.20 | 1.6E−123 | Glycine max | 422 | YES |
| 1807504 | 60476408 | 70.18 | 1.2E−118 | Lotus japonicus | 423 | YES |
| 1807504 | 30314006 | 70.03 | 6.1E−124 | Eschscholzia californica subsp. californica | 424 | YES |
| 1807504 | 3183617 | 69.68 | 5.5E−123 | Antirrhinum majus | 425 | YES |
| 1807504 | 60476426 | 67.93 | 4.5E−112 | Glycine max | 426 | NO |
| 1807504 | 60476410 | 67.27 | 4.6E−103 | Lotus japonicus | 427 | NO |
| 3096137 | 1535623 | 76.75 | 1.3E−163 | Populus balsamifera subsp. trichocarpa | 431 | YES |
| 3096137 | 1482129 | 76.75 | 1.9E−153 | Populus balsamifera subsp. trichocarpa | 433 | NO |
| 3096137 | 932657 | 68.18 | 2.8E−144 | Triticum aestivum | 434 | NO |
| 3096137 | 50912345 | 67.76 | 2.2E−151 | Oryza sativa subsp. japonica | 435 | NO |
| 3096137 | 34898706 | 67.39 | 9.5E−151 | Oryza sativa subsp. japonica | 436 | NO |
| 3096137 | 229480 | 67.00 | 1.6E−141 | Zea mays | 437 | NO |
| 3096137 | 259302 | 65.90 | 6.7E−150 | Zea mays | 438 | YES |
| 3096137 | 51535770 | 65.83 | 5.8E−151 | Oryza sativa subsp. japonica | 439 | NO |
| 3096137 | 257896 | 65.23 | 2.4E−136 | Zea mays | 440 | NO |
| 3096137 | 1496626 | 64.51 | 1.1E−97 | Populus balsamifera subsp. trichocarpa | 442 | NO |
| 3096137 | 557220 | 64.03 | 4.6E−135 | Triticum aestivum | 443 | YES |
| 3096137 | 50726342 | 63.97 | 3.5E−50 | Oryza sativa subsp. japonica | 444 | NO |
| 3096137 | 50905855 | 62.70 | 1.9E−145 | Oryza sativa subsp. japonica | 445 | YES |
| 3096137 | 1443691 | 61.64 | 3.2E−105 | Populus balsamifera subsp. trichocarpa | 447 | NO |
| 7082162 | 25991347 | 93.70 | 6.5E−278 | Brassica napus | 450 | YES |
| 7082162 | 3283433 | 92.79 | 8.6E−276 | Sinapis alba | 451 | YES |
| 7082162 | 20198148 | 85.40 | 9.5E−254 | Arabidopsis thaliana | 452 | NO |
| 7082162 | 42569237 | 85.40 | 9.5E−254 | Arabidopsis thaliana | 453 | NO |
| 7082162 | 5915822 | 59.67 | 3.1E−168 | Sorghum bicolor | 454 | YES |
| 7082162 | 1470714 | 59.23 | 3.2E−151 | Populus balsamifera subsp. trichocarpa | 456 | YES |
| 7082162 | 1470707 | 58.80 | 5.3E−149 | Populus balsamifera subsp. trichocarpa | 458 | NO |
| 7082162 | 1449045 | 58.37 | 1.3E−152 | Populus balsamifera subsp. trichocarpa | 460 | NO |
| 7082162 | 532331 | 56.67 | 4E−152 | Glycine max | 461 | YES |
| 7082162 | 47156051 | 54.60 | 1.7E−142 | Lotus japonicus | 462 | YES |
| 7082162 | 6739530 | 54.17 | 1.1E−156 | Manihot esculenta | 463 | YES |
| 7082162 | 56553508 | 53.79 | 4.8E−156 | Manihot esculenta | 464 | NO |
| 7082162 | 47156049 | 53.66 | 2.8E−142 | Lotus japonicus | 465 | NO |
| 7082162 | 6739527 | 53.07 | 1.2E−159 | Manihot esculenta | 466 | NO |
| 13647376 | 951785 | 61.11 | 4E−14 | Brassica napus | 471 | YES |
| 13647376 | 1440346 | 47.46 | 6.8E−07 | Populus balsamifera subsp. trichocarpa | 473 | YES |
| 13647710 | 556472 | 41.34 | 1.6E−26 | Glycine max | 476 | YES |
| 13647710 | 18650662 | 70.17 | 4.5E−54 | Lycopersicon esculentum | 477 | YES |
| 13647710 | 685191 | 62.42 | 3.5E−38 | Triticum aestivum | 478 | YES |
| 13647710 | 19507 | 63.52 | 3.1E−46 | Lupinus polyphyllus | 479 | YES |
| 13647710 | 314589 | 63.58 | 5E−39 | Zea mays | 480 | YES |
| 13621103 | 20269055 | 54.65 | 7.4E−38 | Populus tremula x Populus tremuloides | 489 | YES |
| 13621103 | 1524883 | 55.03 | 2.6E−37 | Populus balsamifera subsp. trichocarpa | 491 | YES |
| 13621103 | 1497918 | 54.76 | 7.2E−35 | Populus balsamifera subsp. trichocarpa | 493 | NO |
| 13621103 | 1471472 | 53.64 | 7.3E−26 | Populus balsamifera subsp. trichocarpa | 495 | NO |
| 13621103 | 20269053 | 52.35 | 1E−33 | Populus tremula x Populus tremuloides | 496 | NO |
| 13621103 | 675127 | 46.86 | 4.8E−34 | Glycine max | 497 | YES |
| 13621103 | 50912269 | 46.47 | 5.6E−24 | Oryza sativa subsp. japonica | 498 | NO |
| 13621103 | 742023 | 36.00 | 4.3E−19 | Triticum aestivum | 499 | NO |
| 13621103 | 32400272 | 36.00 | 4.3E−19 | Triticum aestivum | 500 | NO |
| 13621103 | 962494 | 32.45 | 1.7E−15 | Brassica napus | 501 | NO |
| 13621103 | 32396299 | 30.29 | 1.2E−17 | Pinus taeda | 502 | NO |
| 13621103 | 32396293 | 35.93 | 6E−18 | Pinus taeda | 503 | NO |
| 13621103 | 29465672 | 36.00 | 9.9E−19 | Vitis vinifera | 504 | NO |
| 12733452 | 482437 | 62.57 | 3.6E−52 | Glycine max | 507 | YES |
| 12733452 | 52077327 | 67.26 | 2.3E−53 | Oryza sativa subsp. japonica | 508 | YES |
| 12733452 | 1548279 | 64.50 | 7.8E−53 | Zea mays | 509 | YES |
| 12733452 | 727056 | 69.57 | 3.2E−21 | Triticum aestivum | 510 | YES |
| 12734583 | 50949065 | 34.30 | 1.2E−29 | Oryza sativa | 513 | NO |
| 12734583 | 1316822 | 33.88 | 1.2E−36 | Triticum aestivum | 514 | YES |
| 12734583 | 55168346 | 64.81 | 2.1E−32 | Oryza sativa subsp. japonica | 515 | NO |
| 12734583 | 81686872 | 63.25 | 3.6E−39 | Oryza sativa subsp. japonica | 516 | YES |
| 12734583 | 28070968 | 27.08 | 1.3E−21 | Lycopersicon esculentum | 517 | YES |
| 12734583 | 1472175 | 57.50 | 6.3E−20 | Glycine max | 518 | NO |
| 12734583 | 1508018 | 55.00 | 1.3E−18 | Glycine max | 519 | YES |
| 12734583 | 61217028 | 54.76 | 9.7E−22 | Petunia x hybrida | 520 | YES |
| 12734583 | 61216997 | 50.00 | 9E−20 | Antirrhinum majus | 521 | YES |
| 12734583 | 39841617 | 38.93 | 3.8E−34 | Zea mays | 522 | NO |
| 12734583 | 61217580 | 42.98 | 7.2E−34 | Zea mays | 523 | YES |
| 12734583 | 325979 | 51.19 | 7.8E−34 | Zea mays | 524 | NO |
| 12734583 | 3955019 | 13.89 | 4.8E−11 | Populus tremula x Populus tremuloides | 525 | NO |
| 12734583 | 40233103 | 15.21 | 4.8E−11 | Populus tomentosa | 526 | NO |
| 13607033 | 34904200 | 20.25 | 0.0000001 | Oryza sativa subsp. japonica | 529 | NO |
| 13607033 | 56784164 | 50.63 | 8.7E−08 | Oryza sativa subsp. japonica | 530 | NO |
| 13607033 | 1467355 | 49.46 | 1.1E−29 | Populus balsamifera subsp. trichocarpa | 531 | NO |
| 13607033 | 1467355 | 49.46 | 1.1E−29 | Populus balsamifera subsp. trichocarpa | 532 | NO |
| 13607033 | 914912 | 45.88 | 1.3E−07 | Triticum aestivum | 533 | NO |
| 13607033 | 1237838 | 31.58 | 7.5E−29 | Glycine max | 534 | NO |
| 13592772 | 1512677 | 68.38 | 1.9E−59 | Populus balsamifera subsp. trichocarpa | 540 | YES |
| 13592772 | 1459412 | 68.38 | 1.9E−59 | Populus balsamifera subsp. trichocarpa | 542 | NO |
| 13592772 | 523802 | 56.67 | 7.7E−59 | Glycine max | 543 | YES |
| 13592772 | 22773261 | 46.20 | 1.1E−45 | Oryza sativa subsp. japonica | 544 | YES |
| 13614632 | 1523115 | 56.62 | 2E−85 | Populus balsamifera subsp. trichocarpa | 548 | YES |
| 13593033 | 563805 | 57.18 | 2.3E−82 | Glycine max | 551 | YES |
| 13593033 | 50252324 | 43.43 | 1.3E−49 | Oryza sativa subsp. japonica | 552 | YES |
| 13593033 | 50946029 | 44.84 | 9.3E−53 | Oryza sativa subsp. japonica | 553 | YES |
| 13593033 | 359116 | 33.22 | 3.1E−30 | Zea mays | 554 | NO |
| 13593033 | 1466509 | 46.63 | 1.8E−29 | Populus balsamifera subsp. trichocarpa | 556 | NO |
| 13593033 | 29466635 | 19.03 | 1.6E−08 | Oryza sativa | 557 | YES |
| 13593033 | 1479796 | 42.63 | 1.2E−32 | Populus balsamifera subsp. trichocarpa | 559 | YES |
| 13610698 | 1510814 | 66.43 | 3E−146 | Populus balsamifera subsp. trichocarpa | 563 | YES |
| 13610698 | 1457602 | 65.92 | 2.5E−144 | Populus balsamifera subsp. trichocarpa | 565 | NO |
| 13610698 | 1465272 | 65.63 | 1.7E−154 | Populus balsamifera subsp. trichocarpa | 567 | NO |
| 13610698 | 50942577 | 52.86 | 2.1E−118 | Oryza sativa subsp. japonica | 568 | YES |
| 23505182 | 50906279 | 65.83 | 8.6E−103 | Oryza sativa subsp. japonica | 571 | YES |
| 23505182 | 498454 | 59.71 | 8.1E−91 | Zea mays | 572 | YES |
| 23505182 | 565294 | 58.12 | 9.6E−88 | Glycine max | 573 | YES |
| 13645995 | 1503065 | 86.96 | 8E−20 | Populus balsamifera subsp. trichocarpa | 577 | NO |
| 13645995 | 1450024 | 86.96 | 8E−20 | Populus balsamifera subsp. trichocarpa | 579 | NO |
| 13645995 | 1458507 | 86.96 | 8E−20 | Populus balsamifera subsp. trichocarpa | 581 | NO |
| 13645995 | 1476818 | 86.96 | 8E−20 | Populus balsamifera subsp. trichocarpa | 583 | NO |
| 13645995 | 56783710 | 85.00 | 1.2E−29 | Oryza sativa subsp. japonica | 584 | NO |
| 13645995 | 34903284 | 40.57 | 1.3E−27 | Oryza sativa subsp. japonica | 585 | NO |
| 13645995 | 1669341 | 85.00 | 3.1E−27 | Cucurbita maxima | 586 | NO |
| 13645995 | 1479325 | 81.67 | 1.3E−26 | Populus balsamifera subsp. trichocarpa | 588 | NO |
| 13592165 | 1455805 | 65.34 | 6E−134 | Populus balsamifera subsp. trichocarpa | 592 | YES |
| 13592165 | 1529744 | 64.60 | 6.7E−119 | Populus balsamifera subsp. trichocarpa | 594 | NO |
| 13592165 | 1476297 | 64.36 | 3.5E−97 | Populus balsamifera subsp. trichocarpa | 596 | NO |
| 13592165 | 62734646 | 50.74 | 5.2E−95 | Oryza sativa subsp. japonica | 597 | YES |
| 13592165 | 218213 | 45.15 | 1.7E−84 | Zea mays | 598 | YES |
| 13592165 | 50948139 | 50.47 | 9.7E−88 | Oryza sativa subsp. japonica | 599 | YES |
| 23495481 | 980164 | 84.48 | 8.6E−48 | Brassica napus | 602 | YES |
| 23495481 | 37536722 | 62.00 | 1.8E−22 | Oryza sativa subsp. japonica | 603 | YES |
| 23495481 | 37536720 | 61.62 | 2.2E−24 | Oryza sativa subsp. japonica | 604 | NO |
| 23495481 | 373282 | 60.38 | 1.5E−25 | Zea mays | 605 | YES |
| 23495481 | 37536718 | 60.19 | 5.2E−25 | Oryza sativa subsp. japonica | 606 | NO |
| 23495481 | 60542797 | 59.65 | 3.3E−30 | Capsicum chinense | 607 | YES |
| 23495481 | 620364 | 59.26 | 4.3E−30 | Glycine max | 608 | YES |
| 23495481 | 46095207 | 57.89 | 1.4E−29 | Lycopersicon esculentum | 609 | YES |
| 23495481 | 1447245 | 56.90 | 9.1E−28 | Populus balsamifera subsp. trichocarpa | 611 | YES |
| 23495481 | 4454097 | 56.52 | 1.3E−28 | Catharanthus roseus | 612 | NO |
| 23495481 | 1199774 | 56.52 | 5.6E−28 | Populus nigra | 613 | YES |
| 23495481 | 407410 | 55.65 | 2.7E−28 | Catharanthus roseus | 614 | NO |
| 23495481 | 10798758 | 54.46 | 1.8E−29 | Nicotiana tabacum | 615 | YES |
| 23495481 | 18316 | 54.39 | 8.2E−27 | Daucus carota | 616 | YES |
| 23495481 | 60459393 | 54.39 | 8.2E−27 | Capsicum annuum | 617 | YES |
| 23531413 | 1104601 | 71.83 | 4.1E−20 | Brassica napus | 622 | NO |
| 23531413 | 1100450 | 75.81 | 2.5E−16 | Brassica napus | 623 | YES |
| 23531413 | 1467420 | 72.09 | 1E−12 | Populus balsamifera subsp. trichocarpa | 625 | NO |
| 23531413 | 1483277 | 70.83 | 2.3E−22 | Populus balsamifera subsp. trichocarpa | 627 | YES |
| 23531413 | 2921332 | 65.00 | 2.8E−10 | Gossypium hirsutum | 628 | NO |
| 23531413 | 51872289 | 65.00 | 2.8E−10 | Gossypium arboreum | 629 | NO |
| 23531413 | 711042 | 64.06 | 1.1E−17 | Glycine max | 630 | NO |
| 23531413 | 54290864 | 54.55 | 4.5E−14 | Oryza sativa subsp. japonica | 631 | NO |
| 23531413 | 15042122 | 62.50 | 7.3E−10 | Zea luxurians | 632 | NO |
| 13606025 | 1083282 | 88.28 | 6.3E−64 | Brassica napus | 635 | YES |
| 13606025 | 1068274 | 84.83 | 8.5E−60 | Brassica napus | 636 | NO |
| 13606025 | 1064745 | 65.87 | 5.3E−35 | Zea mays | 637 | YES |
| 13606025 | 627586 | 56.62 | 1.1E−29 | Glycine max | 638 | YES |
| 13606025 | 1169018 | 58.76 | 9.4E−22 | Glycine max | 639 | YES |
| 13606025 | 232678 | 40.50 | 8.4E−14 | Zea mays | 640 | NO |
| 13606025 | 443590 | 35.92 | 4.8E−11 | Zea mays | 641 | NO |
| 13606025 | 678915 | 50.89 | 2.2E−16 | Triticum aestivum | 642 | YES |
| 13606025 | 1048159 | 51.00 | 3.1E−14 | Triticum aestivum | 643 | NO |
| 13606025 | 53793564 | 47.76 | 2.9E−07 | Oryza sativa subsp. japonica | 644 | YES |
| 13606025 | 34909878 | 32.43 | 1.9E−07 | Oryza sativa subsp. japonica | 645 | NO |
| 13606025 | 20149050 | 30.69 | 0.0000011 | Capsicum annuum | 646 | YES |
| 13606025 | 10185818 | 31.78 | 1.7E−08 | Tulipa gesneriana | 647 | NO |
| 23364445 | 1497025 | 58.49 | 8.1E−43 | Populus balsamifera subsp. trichocarpa | 651 | YES |
| 23364445 | 1659056 | 56.25 | 6.2E−36 | Glycine max | 652 | YES |
| 23509199 | 1471610 | 58.57 | 6.2E−13 | Populus balsamifera subsp. trichocarpa | 658 | YES |
| 23509199 | 34895596 | 41.62 | 8.8E−28 | Oryza sativa subsp. japonica | 659 | YES |
| 23509199 | 963612 | 45.88 | 8.9E−25 | Brassica napus | 660 | YES |
| 23509199 | 1449284 | 44.44 | 1.3E−26 | Populus balsamifera subsp. trichocarpa | 662 | NO |
| 23509199 | 1060169 | 41.96 | 1.8E−13 | Glycine max | 663 | YES |
| 23509199 | 1688030 | 41.57 | 4.9E−20 | Zea mays | 664 | YES |
| 23509199 | 18390109 | 30.46 | 6.1E−12 | Sorghum bicolor | 665 | NO |
| 12667412 | 1445379 | 52.17 | 1.6E−30 | Populus balsamifera subsp. trichocarpa | 669 | YES |
| 12667412 | 1044811 | 50.62 | 9E−34 | Glycine max | 670 | YES |
| 12667412 | 522952 | 48.02 | 4.7E−34 | Glycine max | 671 | NO |
| 12667412 | 479801 | 47.52 | 4.7E−34 | Glycine max | 672 | NO |
| 12667412 | 1449468 | 48.59 | 5.5E−28 | Populus balsamifera subsp. trichocarpa | 674 | NO |
| 12667412 | 1461090 | 47.73 | 2.4E−18 | Populus balsamifera subsp. trichocarpa | 676 | NO |
| 12667412 | 276476 | 30.39 | 2.3E−18 | Zea mays | 677 | YES |
| 12385780 | 1464833 | 82.76 | 9E−24 | Populus balsamifera subsp. trichocarpa | 681 | YES |
| 12385780 | 4567313 | 29.11 | 1.2E−17 | Arabidopsis thaliana | 682 | YES |
| 12385780 | 1452647 | 81.08 | 5.2E−15 | Populus balsamifera subsp. trichocarpa | 684 | YES |
| 12385780 | 1458150 | 79.66 | 3.6E−26 | Populus balsamifera subsp. trichocarpa | 686 | YES |
| 12385780 | 50933653 | 36.36 | 6.5E−22 | Oryza sativa subsp. japonica | 687 | YES |
| 12385780 | 375181 | 31.11 | 2.7E−21 | Zea mays | 688 | YES |
| 12385780 | 393033 | 36.65 | 4.8E−25 | Zea mays | 689 | YES |
| 12385780 | 666751 | 34.23 | 3.3E−24 | Glycine max | 690 | YES |
| 23521525 | 1491996 | 50.37 | 4E−25 | Populus balsamifera subsp. trichocarpa | 702 | NO |
| 23521525 | 1439136 | 50.00 | 2.2E−24 | Populus balsamifera subsp. trichocarpa | 704 | NO |
| 23521525 | 57117314 | 25.96 | 3.6E−16 | Populus x canescens | 705 | NO |
| 23521525 | 647103 | 34.43 | 5.7E−23 | Glycine max | 706 | NO |
| 23521525 | 819214 | 30.88 | 3.4E−25 | Triticum aestivum | 707 | YES |
| 23521525 | 708708 | 33.33 | 5E−15 | Glycine max | 708 | YES |
| 23521525 | 28558782 | 35.05 | 1.5E−24 | Cucumis melo | 709 | NO |
| 23521525 | 23451086 | 16.03 | 2.3E−17 | Medicago sativa | 710 | NO |
| 23521525 | 957229 | 29.19 | 5.8E−17 | Brassica napus | 711 | NO |
| 23521525 | 50900320 | 32.26 | 2.7E−23 | Oryza sativa subsp. japonica | 712 | NO |
| 23521525 | 1603708 | 31.67 | 8.8E−18 | Parthenium argentatum | 713 | NO |
| 23521525 | 398008 | 22.75 | 5E−21 | Zea mays | 714 | NO |
| 13576188 | 1404062 | 79.22 | 5.9E−100 | Zea mays | 717 | YES |
| 13576188 | 1541512 | 57.26 | 1.2E−64 | Populus balsamifera subsp. trichocarpa | 719 | YES |
| 13576188 | 715530 | 52.85 | 3.4E−65 | Glycine max | 720 | YES |
| 13576188 | 1455981 | 55.64 | 5.8E−65 | Populus balsamifera subsp. trichocarpa | 722 | NO |
| 13576188 | 62734221 | 54.80 | 1.5E−56 | Oryza sativa subsp. japonica | 723 | YES |
| 13576188 | 772319 | 47.73 | 6E−59 | Triticum aestivum | 724 | YES |
| 13576188 | 224054 | 47.73 | 5E−55 | Zea mays | 725 | NO |
| 23360146 | 1443950 | 50.52 | 1.9E−50 | Populus balsamifera subsp. trichocarpa | 732 | YES |
| 23360146 | 1486315 | 49.13 | 6.8E−46 | Populus balsamifera subsp. trichocarpa | 734 | NO |
| 23360146 | 712340 | 45.26 | 8.3E−41 | Glycine max | 735 | YES |
| 23360146 | 1235862 | 55.41 | 1.3E−15 | Glycine max | 736 | NO |
| 23360146 | 335314 | 32.27 | 8E−24 | Zea mays | 737 | YES |
| 23358032 | 23429649 | 35.60 | 5.6E−32 | Lycopersicon esculentum | 740 | YES |
| 13575362 | 1486224 | 59.67 | 5.3E−78 | Populus balsamifera subsp. trichocarpa | 748 | YES |
| 13575362 | 1444021 | 58.03 | 5.3E−71 | Populus balsamifera subsp. trichocarpa | 750 | NO |
| 13575362 | 23451086 | 53.93 | 1.6E−56 | Medicago sativa | 751 | YES |
| 13575362 | 474127 | 54.46 | 6E−75 | Glycine max | 752 | YES |
| 12670870 | 1362011 | 95.02 | 0 | Arabidopsis thaliana | 759 | NO |
| 12670870 | 1485236 | 70.63 | 7.9E−155 | Populus balsamifera subsp. trichocarpa | 761 | YES |
| 12670870 | 60593177 | 68.00 | 2.5E−143 | Medicago truncatula | 762 | YES |
| 12670870 | 1446740 | 67.95 | 4.5E−152 | Populus balsamifera subsp. trichocarpa | 764 | NO |
| 12670870 | 30526087 | 67.13 | 0 | Pisum sativum | 765 | YES |
| 12670870 | 28624856 | 64.97 | 0 | Lotus japonicus | 766 | YES |
| 12670870 | 30526089 | 66.67 | 0 | Pisum sativum | 767 | NO |
| 12670870 | 4101570 | 66.20 | 0 | Pisum sativum | 768 | NO |
| 12670870 | 42795315 | 61.82 | 0 | Mimulus lewisii | 769 | YES |
| 12670870 | 547307 | 63.55 | 1.2E−142 | Antirrhinum majus | 770 | YES |
| 12670870 | 42795317 | 60.92 | 0 | Mimulus guttatus | 771 | YES |
| 23495291 | 1439158 | 44.44 | 1.4E−56 | Populus balsamifera subsp. trichocarpa | 775 | YES |
| 23495291 | 1492026 | 44.14 | 2.6E−55 | Populus balsamifera subsp. trichocarpa | 777 | NO |
| 23495291 | 928574 | 39.87 | 3.4E−44 | Triticum aestivum | 778 | YES |
| 23495291 | 57900395 | 39.19 | 2.7E−44 | Oryza sativa subsp. japonica | 779 | YES |
| 13612399 | 473933 | 49.85 | 8.5E−60 | Glycine max | 782 | YES |
| 13612399 | 1653608 | 47.76 | 1.4E−24 | Glycine max | 783 | YES |
| 13612399 | 398141 | 35.63 | 6.5E−30 | Zea mays | 784 | YES |
| 23522373 | 1221348 | 80.65 | 4.7E−150 | Zea mays | 787 | YES |
| 23522373 | 1538994 | 71.26 | 3.6E−120 | Populus balsamifera subsp. trichocarpa | 789 | YES |
| 23522373 | 3336903 | 64.19 | 6.4E−118 | Petroselinum crispum | 790 | YES |
| 23522373 | 1500081 | 69.50 | 1E−113 | Populus balsamifera subsp. trichocarpa | 792 | NO |
| 23522373 | 545441 | 68.66 | 3E−123 | Glycine max | 793 | YES |
| 23522373 | 5381313 | 64.99 | 3.6E−124 | Catharanthus roseus | 794 | YES |
| 23522373 | 3336906 | 64.84 | 7.9E−120 | Petroselinum crispum | 795 | NO |
| 23522373 | 13775109 | 64.63 | 3.8E−120 | Phaseolus vulgaris | 796 | YES |
| 23522373 | 1447080 | 65.76 | 3.8E−116 | Populus balsamifera subsp. trichocarpa | 798 | NO |
| 12672729 | 1343575 | 82.20 | 0 | Arabidopsis thaliana | 803 | NO |
| 12672729 | 20259635 | 82.20 | 0 | Arabidopsis thaliana | 804 | NO |
| 12672729 | 66932877 | 81.94 | 1.5E−185 | Lotus japonicus | 805 | YES |
| 12672729 | 4558462 | 78.04 | 0 | Medicago sativa subsp. x varia | 806 | YES |
| 12672729 | 7158292 | 77.61 | 0 | Medicago truncatula | 807 | YES |
| 12672729 | 66932879 | 78.43 | 2.2E−184 | Pisum sativum | 808 | YES |
| 12672729 | 1500350 | 78.24 | 1.3E−188 | Populus balsamifera subsp. trichocarpa | 810 | YES |
| 4984839 | 71834749 | 74.19 | 1E−60 | Brassica rapa subsp. pekinensis | 813 | YES |
| 4984839 | 71834747 | 69.35 | 2.2E−58 | Brassica rapa subsp. pekinensis | 814 | NO |
| 4984839 | 31580813 | 60.71 | 1E−46 | Brassica napus | 815 | YES |
| 4984839 | 15667638 | 32.18 | 1.5E−21 | Cryptomeria japonica | 816 | YES |
| 4984839 | 17933458 | 60.20 | 4E−45 | Brassica napus | 817 | NO |
| 4984839 | 73915377 | 60.00 | 2.3E−45 | Arabidopsis arenosa | 818 | YES |
| 4984839 | 17933450 | 59.39 | 1.5E−45 | Brassica napus | 819 | NO |
| 4984839 | 1065387 | 59.39 | 1.2E−45 | Brassica napus | 820 | NO |
| 36817505 | 1459700 | 61.87 | 2.6E−229 | Populus balsamifera subsp. trichocarpa | 824 | YES |
| 36817505 | 1512967 | 61.62 | 6.7E−222 | Populus balsamifera subsp. trichocarpa | 826 | NO |
| 36817505 | 50928937 | 56.80 | 1.1E−175 | Oryza sativa subsp. japonica | 827 | YES |
| 13610436 | 21554247 | 98.44 | 1.1E−64 | Arabidopsis thaliana | 832 | NO |
| 13610436 | 112157 | 89.06 | 1.4E−56 | Arabidopsis thaliana | 833 | NO |
| 13610436 | 150107 | 87.50 | 1.7E−55 | Arabidopsis thaliana | 834 | NO |
| 13610436 | 1118497 | 77.34 | 8.1E−48 | Brassica napus | 835 | YES |
| 13610436 | 1265409 | 80.67 | 5.1E−46 | Brassica napus | 836 | NO |
| 13610436 | 963126 | 75.78 | 9.2E−47 | Brassica napus | 837 | NO |
| 13610436 | 968344 | 76.56 | 1.3E−49 | Brassica napus | 838 | NO |
| 13489667 | 951261 | 90.60 | 1.4E−50 | Brassica napus | 841 | NO |
| 13489667 | 1258526 | 89.51 | 3.1E−62 | Brassica napus | 842 | YES |
| 13489667 | 1380957 | 87.94 | 1.4E−59 | Zea mays | 843 | YES |
| 13489667 | 973721 | 84.68 | 3.4E−49 | Brassica napus | 844 | NO |
| 13489667 | 587233 | 78.46 | 2.1E−40 | Glycine max | 845 | NO |
| 13489667 | 1115876 | 70.68 | 2.3E−41 | Glycine max | 846 | NO |
| 13489667 | 615004 | 51.88 | 2.9E−27 | Glycine max | 847 | NO |
| 13489667 | 1610049 | 68.04 | 9.1E−27 | Parthenium argentatum | 848 | YES |
| 13489667 | 665805 | 64.35 | 3.1E−30 | Glycine max | 849 | NO |
| 13489667 | 685101 | 48.33 | 4.8E−18 | Triticum aestivum | 850 | NO |
| 13489667 | 50908919 | 41.98 | 2.9E−20 | Oryza sativa subsp. japonica | 851 | YES |
| 13489667 | 58737210 | 49.00 | 1.2E−17 | Oryza sativa | 852 | NO |
| 13489667 | 1330739 | 39.69 | 3E−18 | Triticum aestivum | 853 | YES |
| 13489667 | 50923897 | 44.04 | 2.1E−18 | Oryza sativa subsp. japonica | 854 | YES |
| 13489667 | 1707981 | 42.27 | 5.6E−12 | Ricinus communis | 855 | YES |
| 12332453 | 1065020 | 93.78 | 3.8E−105 | Zea mays | 858 | YES |
| 12332453 | 1381401 | 91.22 | 7.3E−102 | Zea mays | 859 | NO |
| 12332453 | 1473760 | 84.86 | 2E−87 | Populus balsamifera subsp. trichocarpa | 861 | YES |
| 12332453 | 51090974 | 77.72 | 1.1E−76 | Oryza sativa subsp. japonica | 862 | YES |
| 12332453 | 558051 | 68.90 | 1.2E−76 | Glycine max | 863 | NO |
| 12332453 | 1047194 | 75.74 | 2.5E−86 | Glycine max | 864 | NO |
| 12332453 | 1248638 | 65.57 | 6.9E−42 | Glycine max | 865 | YES |
| 12332453 | 615686 | 67.63 | 2.3E−75 | Triticum aestivum | 866 | YES |
| 12332453 | 524043 | 71.97 | 1.7E−61 | Glycine max | 867 | YES |
| 12700063 | 1497958 | 78.00 | 9.1E−170 | Populus balsamifera subsp. trichocarpa | 875 | YES |
| 12700063 | 1444972 | 78.00 | 3E−162 | Populus balsamifera subsp. trichocarpa | 877 | NO |
| 12700063 | 1471743 | 77.75 | 3.5E−168 | Populus balsamifera subsp. trichocarpa | 879 | NO |
| 12700063 | 1043309 | 73.11 | 8.6E−158 | Glycine max | 880 | YES |
| 12601981 | 4894170 | 55.79 | 0 | Cicer arietinum | 881 | NO |
| 12601981 | 521542 | 54.85 | 0 | Glycine max | 881 | YES |
| 12601981 | 33521521 | 54.49 | 0 | Medicago truncatula | 881 | YES |
| 12601981 | 81157970 | 0.00 | 0 | Sesamum radiatum | 881 | NO |
| 12601981 | 81157968 | 0.00 | 0 | Sesamum indicum | 881 | NO |
| 12601981 | 3059131 | 51.35 | 1.5E−121 | Helianthus tuberosus | 881 | NO |
| 12601981 | 7415996 | 51.02 | 0 | Lotus japonicus | 881 | YES |
| 12601981 | 2443348 | 50.61 | 0 | Glycyrrhiza echinata | 881 | YES |
| 12601981 | 3059129 | 50.41 | 1.3E−120 | Helianthus tuberosus | 881 | YES |
| 12601981 | 4200044 | 50.41 | 0 | Glycyrrhiza echinata | 881 | NO |
| 12601981 | 81157972 | 0.00 | 0 | Sesamum alatum | 881 | YES |
| 12601981 | 37726104 | 48.97 | 1.8E−125 | Pisum sativum | 881 | YES |
| 12695887 | 1480956 | 64.10 | 1.1E−32 | Glycine max | 881 | YES |
| 12700063 | 1058118 | 70.66 | 7.6E−150 | Glycine max | 881 | NO |
| 12721393 | 627596 | 66.73 | 0 | Glycine max | 881 | YES |
| 12721393 | 1173624 | 0.66 | 0 | Phalaenopsis sp. SM9108 | 881 | NO |
| 12721393 | 50939101 | 54.65 | 0 | Oryza sativa subsp. japonica | 881 | YES |
| 12721393 | 906986 | 57.47 | 9E−75 | Triticum aestivum | 881 | NO |
| 12721393 | 779234 | 50.29 | 1.1E−128 | Triticum aestivum | 881 | YES |
| 12721393 | 1551657 | 54.00 | 3.8E−131 | Zea mays | 881 | YES |
| 12721393 | 1600726 | 46.07 | 9.8E−54 | Zea mays | 881 | NO |
| 12721393 | 1601442 | 53.28 | 3E−131 | Zea mays | 881 | NO |
| 12721393 | 5921925 | 0.51 | 0 | Pinus radiata | 881 | YES |
| 12724333 | 963612 | 83.91 | 3.3E−74 | Brassica napus | 881 | YES |
| 12724333 | 34895596 | 47.86 | 1.1E−36 | Oryza sativa subsp. japonica | 881 | YES |
| 12724333 | 1688030 | 52.27 | 8.5E−21 | Zea mays | 881 | YES |
| 12724333 | 18390109 | 26.64 | 1.3E−15 | Sorghum bicolor | 881 | YES |
| 23498145 | 903520 | 57.47 | 8.8E−116 | Triticum aestivum | 881 | YES |
| 23498145 | 1601097 | 57.28 | 1.9E−129 | Zea mays | 881 | YES |
| 23498145 | 54290354 | 55.00 | 0 | Oryza sativa subsp. japonica | 881 | YES |
| 23498145 | 479101 | 54.83 | 0 | Glycine max | 881 | YES |
| 23498145 | 34912880 | 55.05 | 0 | Oryza sativa subsp. japonica | 881 | NO |
| 23498145 | 1589607 | 55.09 | 2.5E−143 | Zea mays | 881 | NO |
| 23498145 | 21842133 | 54.24 | 0 | Zea mays | 881 | NO |
| 23513037 | 251685 | 92.20 | 4.1E−68 | Arabidopsis thaliana | 881 | NO |
| 23513037 | 11994638 | 89.14 | 1.3E−80 | Arabidopsis thaliana | 881 | NO |
| 12700063 | 233103 | 64.36 | 7.3E−97 | Zea mays | 882 | YES |
| 12721393 | 1471370 | 0.00 | 0 | Populus balsamifera subsp. trichocarpa | 882 | NO |
| 12721393 | 1500987 | 0.00 | 0 | Populus balsamifera subsp. trichocarpa | 882 | NO |
| 12721393 | 1444471 | 0.00 | 0 | Populus balsamifera subsp. trichocarpa | 882 | NO |
| 12721393 | 1490915 | 0.00 | 0 | Populus balsamifera subsp. trichocarpa | 882 | NO |
| 12721393 | 1438105 | 0.00 | 0 | Populus balsamifera subsp. trichocarpa | 882 | YES |
| 23498145 | 1482371 | 0.00 | 0 | Populus balsamifera subsp. trichocarpa | 882 | YES |
| 23498145 | 1482362 | 0.00 | 0 | Populus balsamifera subsp. trichocarpa | 882 | NO |
| 23498145 | 1489077 | 0.00 | 0 | Populus balsamifera subsp. trichocarpa | 882 | NO |
| 23498145 | 1482356 | 0.00 | 0 | Populus balsamifera subsp. trichocarpa | 882 | NO |
| 23498145 | 1484293 | 0.00 | 0 | Populus balsamifera subsp. trichocarpa | 882 | NO |
| 12700063 | 34914854 | 63.21 | 1.2E−121 | Oryza sativa subsp. japonica | 883 | YES |
| 12700063 | 900752 | 62.87 | 2.4E−121 | Triticum aestivum | 884 | YES |
| 12730465 | 1459998 | 69.10 | 6.9E−53 | Populus balsamifera subsp. trichocarpa | 888 | YES |
| 12730465 | 1513263 | 68.60 | 4.1E−48 | Populus balsamifera subsp. trichocarpa | 890 | NO |
| 12730465 | 545208 | 68.59 | 8.8E−59 | Glycine max | 891 | YES |
| 12730465 | 50933031 | 57.50 | 7.5E−46 | Oryza sativa subsp. japonica | 892 | YES |
| 12730465 | 336092 | 59.09 | 1.7E−48 | Zea mays | 893 | YES |
| 12730465 | 771679 | 49.72 | 5.5E−21 | Triticum aestivum | 894 | YES |
| 12730465 | 28558779 | 40.54 | 1.1E−26 | Cucumis melo | 895 | YES |
| 12559673 | 50949165 | 74.89 | 2.5E−174 | Oryza sativa subsp. japonica | 900 | YES |
| 12559673 | 50935893 | 71.90 | 7.9E−171 | Oryza sativa subsp. japonica | 901 | NO |
| 12559673 | 364564 | 71.30 | 3.8E−171 | Zea mays | 902 | YES |
| 12559673 | 1514988 | 70.14 | 3.8E−155 | Populus balsamifera subsp. trichocarpa | 904 | YES |
| 12559673 | 1461702 | 69.16 | 6.4E−137 | Populus balsamifera subsp. trichocarpa | 906 | NO |
| 12663374 | 464433 | 68.80 | 1.6E−142 | Glycine max | 909 | YES |
| 23419575 | 1081216 | 81.62 | 8.5E−52 | Brassica napus | 912 | YES |
| 23419575 | 1448041 | 54.29 | 9.2E−19 | Populus balsamifera subsp. trichocarpa | 914 | NO |
| 23419575 | 1438056 | 47.01 | 1.2E−14 | Populus balsamifera subsp. trichocarpa | 916 | NO |
| 23419575 | 1438055 | 42.52 | 6E−15 | Populus balsamifera subsp. trichocarpa | 918 | NO |
| 23419575 | 50918565 | 37.60 | 2.4E−15 | Oryza sativa subsp. japonica | 919 | YES |
| 23778739 | 53792455 | 70.14 | 1.7E−110 | Oryza sativa subsp. japonica | 922 | YES |
| 23778739 | 34910130 | 69.94 | 6.8E−98 | Oryza sativa subsp. japonica | 923 | NO |
| 23778739 | 1465903 | 64.37 | 9.7E−47 | Populus balsamifera subsp. trichocarpa | 925 | YES |
| 23778739 | 527538 | 38.06 | 1.2E−45 | Glycine max | 926 | YES |
| 23778739 | 53749368 | 52.68 | 1.5E−54 | Oryza sativa subsp. japonica | 927 | NO |
| 23778739 | 954923 | 26.26 | 2.2E−20 | Brassica napus | 928 | NO |
| 23778739 | 11045087 | 26.26 | 2.1E−20 | Brassica napus | 929 | NO |
| 23778739 | 21741062 | 44.05 | 3E−45 | Oryza sativa subsp. japonica | 930 | NO |
| 23778739 | 861529 | 27.44 | 6.4E−23 | Triticum aestivum | 931 | NO |
| 23778739 | 1448710 | 42.38 | 4.2E−46 | Populus balsamifera subsp. trichocarpa | 933 | NO |
| 23778739 | 77999289 | 41.77 | 0.0000048 | Solanum tuberosum | 934 | NO |
| 23800158 | 1464833 | 79.03 | 5.2E−27 | Populus balsamifera subsp. trichocarpa | 938 | YES |
| 23800158 | 77378044 | 71.43 | 8.3E−28 | Gossypium hirsutum | 939 | YES |
| 23800158 | 62733300 | 67.01 | 2.4E−32 | Oryza sativa subsp. japonica | 940 | YES |
| 23800158 | 393033 | 39.08 | 7.2E−39 | Zea mays | 941 | YES |
| 23802651 | 1452212 | 81.65 | 6E−51 | Populus balsamifera subsp. trichocarpa | 945 | YES |
| 23802651 | 1456223 | 81.55 | 1.8E−49 | Populus balsamifera subsp. trichocarpa | 947 | NO |
| 23802651 | 31980093 | 51.10 | 3.2E−45 | Populus tremula x Populus tremuloides | 948 | YES |
| 23802651 | 1443195 | 77.98 | 1.8E−49 | Populus balsamifera subsp. trichocarpa | 950 | NO |
| 23802651 | 50948869 | 51.56 | 2.4E−47 | Oryza sativa subsp. japonica | 951 | YES |
| 23802651 | 520052 | 50.22 | 1.9E−45 | Glycine max | 952 | YES |
| 23802651 | 56783716 | 77.88 | 1.6E−46 | Oryza sativa subsp. japonica | 953 | NO |
| 23802651 | 782178 | 74.44 | 1.6E−34 | Triticum aestivum | 954 | YES |
| 23802651 | 6979341 | 55.11 | 2.9E−51 | Oryza sativa | 955 | YES |
| 23802651 | 1083737 | 60.75 | 3.8E−33 | Brassica napus | 956 | YES |
| 23802651 | 1603814 | 48.89 | 2.2E−30 | Parthenium argentatum | 957 | YES |
| 23803323 | 389639 | 100.00 | 0 | Zea mays | 958 | YES |
| 23513037 | 251685 | 92.20 | 4.1E−68 | Arabidopsis thaliana | 965 | NO |
| 23513037 | 11994638 | 89.10 | 1.3E−80 | Arabidopsis thaliana | 966 | NO |

### REFERENCES

[0179] (1) Zhang et al. (2004) Plant Physiol. 135:615.
[0180] (2) Salomon et al. (1984) EMBO J. 3:141.
[0181] (3) Herrera-Estrella et al. (1983) EMBO J. 2:987.
[0182] (4) Escudero et al. (1996) Plant J. 10:355.
[0183] (5) Ishida et al. (1996) Nature Biotechnology 14:745.
[0184] (6) May et al. (1995) Bio/Technology 13:486)
[0185] (7) Armaleo et al. (1990) Current Genetics 17:97.
[0186] (8) Smith. T. F. and Waterman, M. S. (1981) Adv. App. Math. 2:482.
[0187] (9) Needleman and Wunsch (1970) J. Mol. Biol. 48:443.
[0188] (10) Pearson and Lipman (1988) Proc. Natl. Acad. Sci. (USA) 85: 2444.
[0189] (11) Yamauchi et al. (1996) Plant Mol. Biol. 30:321-9.
[0190] (12) Xu et al. (1995) Plant Mol. Biol. 27:237.
[0191] (13) Yamamoto et al. (1991) Plant Cell 3:371.
[0192] (14) P. Tijessen, “Hybridization with Nucleic Acid Probes” In Laboratory Techniques in Biochemistry and Molecular Biology, P. C. vand der Vliet, ed., c. 1993 by Elsevier, Amsterdam.
[0193] (15) Bonner et al., (1973) J. Mol. Biol. 81:123.
[0194] (16) Sambrook et al., Molecular Cloning: A Laboratory Manual, Second Edition, Cold Spring Harbor Laboratory Press, 1989, New York.
[0195] (17) Shizuya et al. (1992) Proc. Natl. Acad. Sci. USA, 89: 8794-8797.
[0196] (18) Hamilton et al. (1996) Proc. Natl. Acad. Sci. USA, 93: 9975-9979.
[0197] (19) Burke et al. (1987) Science, 236:806-812.
[0198] (20) Sternberg N. et al. (1990) Proc Natl Acad Sci USA., 87:103-7.
[0199] (21) Bradshaw et al. (1995) Nucl Acids Res, 23: 4850-4856.
[0200] (22) Frischauf et al. (1983) J, Mol Biol, 170: 827-842.
[0201] (23) Huynh et al., Glover N M (ed) DNA Cloning: A practical Approach, Vol. 1 Oxford: IRL Press (1985).
[0202] (24) Walden et al. (1990) Mol Cell Biol 1: 175-194.
[0203] (25) Vissenberg et al. (2005) Plant Cell Physiol 46:192.
[0204] (26) Husebye et al. (2002) Plant Physiol 128:1180.
[0205] (27) Plesch et al. (2001) Plant J 28:455.
[0206] (28) Weising et al. (1988) Ann. Rev. Genet., 22:421.
[0207] (29) Christou (1995) Euphytica, v. 85, n.1-3:13-27.
[0208] (30) Newell (2000)
[0209] (31) Griesbach (1987) Plant Sci. 50:69-77.
[0210] (32) Fromm et al. (1985) Proc. Natl. Acad. Sci. USA 82:5824.
[0211] (33) Paszkowski et al. (1984) EMBO J. 3:2717.
[0212] (34) Klein et al. (1987) Nature 327:773.
[0213] (35) Willmitzer, L. (1993) Transgenic Plants. In: iotechnology, A Multi-Volume Comprehensive treatise (H. J. Rehm, G. Reed, A. Püler, P. Stadler, eds., Vol. 2, 627-659, VCH Weinheim-New York-Basel-Cambridge).
[0214] (36) Crit. Rev. Plant. Sci. 4:1-46.
[0215] (37) Fromm et al. (1990) Biotechnology 8:833-844.
[0216] (38) Cho et al. (2000) Planta 210:195-204.
[0217] (39) Brootghaerts et al. (2005) Nature 433:629-633.
[0218] (40) Lincoln et al. (1998) Plant Mol. Biol. Rep. 16:1-4.
[0219] (41) Lacomme et al. (2001), “Genetically Engineered Viruses” (C. J. A. Ring and E. D. Blair, Eds). Pp. 59-99, BIOS Scientific Publishers, Ltd. Oxford, UK.

The application's sequence listing, which the Patent Office published only in electronic form, follows.

SEQUENCE LISTING (965 sequences)

SEQ ID NO: 1 - DNA, 1823 bp, Arabidopsis thaliana
  misc_feature (1)..(1823): Ceres Promoter 21876
gtctcttaaaaaggatgaacaaacacgaaactggtggattatacaaatgtcgccttatacatatatcggttattggccaaaagagctattttaccttatggataatggtgctactatggttggagttggaggtgtagttcaggcttcaccttctggtttaagccctccaatgggtaatggtaaatttccggcaaaaggtcctttgagatcagccatgttttccaatgttgaggtcttatattccaagtatgagaaaggtaaaataaatgcgtttcctatagtggagttgctagatagtagtagatgttatgggctacgaattggtaagagagttcgattttggactagtccactcggatactttttcaattatggtggtcctggaggaatctcttgtggagtttgatatttgcgagtataatctttgaacttgtgtagattgtacccaaaaccgaaaacatatcctatataaatttcattatgagagtaaaattgtttgttttatgtatcatttctcaactgtgattgagttgactattgaaaacatatcttagataagtttcgttatgagagttaatgatgattgatgacatacacactcctttatgatggtgattcaacgttttggagaaaatttatttataatctctcataaattctccgttattagttgaataaaatcttaaatgtctcctttaaccatagcaaaccaacttaaaaatttagattttaaagttaagatggatattgtgattcaacgattaattatcgtaatgcatattgattatgtaaaataaaatctaactaccggaatttattcaataactccattgtgtgactgcatttaaatatatgttttatgtcccattaattaggctgtaatttcgatttatcaatttatatactagtattaatttaattccatagatttatcaaagccaactcatgacggctagggttttccgtcaccttttcgatcatcaagagagtttttttataaaaaaatttatacaattatacaatttcttaaccaaacaacacataattataagctatttaacatttcaaattgaaaaaaaaaatgtatgagaattttgtggatccatttttgtaattctttgttgggtaaattcacaaccaaaaaaatagaaaggcccaaaacgcgtaagggcaaattagtaaaagtagaaccacaaagagaaagcgaaaaccctagacacctcgtagctataagtaccctcgagtcgaccaggattagggtgcgctctcatatttctcacattttcgtagccgcaagactcctttcagattcttacttgcaggttagatattttctctctttagtgtctccgatcttcatcttcttatgattattgtagctgtttagggtttagattcttagttttagctctatattgactgtgattatcgcttattctttgctgttgttatactgcttttgattctctagctttagatccgtttactcgtcgatcaatattgttcctattgagtctgatgtataatcctctgattaattgatagcgtttagttttgatatcgtcttcgcatgttttttatcatgtcgatctgtatctgctctggttatagttgattctgatgtatttggttggtgatgttccttagatttgatatacctgttgtctcgtggtttgatatgatagctcaactggtgatatgtggttttgtttcagtggatctgtgtttgattatattgttgacgttttggttgttgtatggttgatggttgatgtatttttgttgattctgatgtttcgatttttgtttttgttttgacagct

SEQ ID NO: 2 - DNA, 1000 bp, Arabidopsis thaliana
  misc_feature (1)..(1000): Ceres Promoter PT0668
atagagttttactatgcttttggaatctttcttctaatgtgccaactacagagaaatacatgtattaccactaggaatcggaccatatcatagatatcaggattagataactagttctcgtcgctatcacttcgcattaagttctagtaattgttaaagattctaattttttactaaacaaaaactaaatcaacatcaaatatgcaaagtgtgtgttgtccacacaagtgactcaaagtatacgcaggtgggattggaccatattattgcaaatcgtttccgaaccactcatatttctttttttctctcctttttttatccggagaattatggaaccacttcatttcaacttcaaaactaattttttggttcagtgatcaaatacaaaaaaaaaaaaaaagttatagatattaaatagaaaactattccaatcttaaaaatacaaatgaaaccataattttaatttatacaaaactatttaattagctaagggttgtcttaacgtttagaaaataaaaaattatgattgtctgtttaaaattacaatgaatgaataaaaaaaatatgcaatgaatgaaagaataaattttgtacatccgatagaatgagaaaatgaattttgtacaaaccactcaagaattcaaaacaattgtcaaagttttcttctcagccgtgtgtcctcctctcctagccgccacatctcacacactaatgctaaccacgcgatgtaaccgtaagcgctgagtttttgcatttcagatttcacttccaccaaacaaaactcgccacgtcatcaatacgaatcattccgtataaacgtctagattctttacagcctacaatgttctcttctttggtcggccattatttaacgctttgaacctaaatctagcccagccaacgaagaagacgaagcaaatccaaaccaaagttctccattttcgtagcttctttaagctttttcagtatcatagagacacttttttttttttgattagaa

SEQ ID NO: 3 - DNA, 1000 bp, Arabidopsis thaliana
  misc_feature (1)..(1000): Ceres Promoter PT0535
ttagtgaaattatgacattaagtaaggttttcttagttagctaatgtatggctattcaattgttatgttaggctattttagttagtatatgaatttaggcagtctatgcaaatgatttcgttttcattttttcatatgtaaacatcaagatcaagtaacgccattcgagttgatattttttttttaaattagtgtgtgtaaattttggaccgcttatttgagtttgctaatgaagttgcatatatattacgttaaaccataggcaaactaatttgaaacatccgattcgatttcctgtaatttttcttggttaattgaccaaaatcaagatcttcagaaataaaataaaagacgaaagaaagctgtcgcaaagcagattgtgttaaaaaaaagtggattgggctcaaacgcaacttgtccagcccgtgacaattaccctatacgcaagtaagagtaacgtatcactggcaaaagttggtattagttacgatatctttgtcatgggggcatgcatgggcatggcttaagagttaagccttaagaagagtcccacactcgtgactctcatgatcacttgttgtttcttacgggcaaatacatttaactttattcttcatttattcacctatattcttttggataataacttttctctatataaaataacaaacatcgtacgtttcatttatttacaacaagcgatgagaattaaaaggagaccttaattgatgatactcttcttttctctcggttacaacgggattattacagataatgataatctatatggatgctgacgtggaaaaacaaaatttggtgaaacacgtcaattaagcacgacttttccatggctagtggctaagatcgtttcatcacatggctatatcatataatacttggatgaattcaaaataaacgactgagaaaatgtccacgtcacggcgcaccgctttggacttaagtctcctataataaatacaacaccaaacattgcattcca

SEQ ID NO: 4 - DNA, 999 bp, Arabidopsis thaliana
  misc_feature (1)..(999): Ceres Promoter PT0585
tgaagtcatttaatatgagtttgacattaggtaaacctaatctatgagattatagaatgtagcaaaactatcaatgtttcttttccaaaatattttgtggtttttctttttggttcattatgttttgttatttgtgaattattttaatatgaagtaattatattgattttatatgatatacatattattttgatataaaatttaacacttatccattaaaatagcatgggcataatcaaaatcgggactattacgatgaaaaagatagttaaattgtatgataaaataaaatgtgtaagattaaaattttgggttttagaaaattactaaacaaaatatagacaaagtatgttgactattatttaaaatttaaatatcatcaataagatatagttaaagtcattaagtgtatagcaaaatgaaaattctaagattaaaattcgattaaaattttttttactaaattaaatatttaaaaatagggattatcatttactatttacaattctaatatcatgggtaaaaattgataactttttttaaacccgcctatctaggtgggcctaacctagtttactaattactatatgattaacttattaccacttttacttcttcttttttggtcaaattactttattgttttttataaagtcaaattactctttgcattgtaaataatagtagtaactaaaatcttaaaacaaaatattcaacctttcccattattggaatggtaatgtcttcaacaccattgaccaacgttaaggaatgtcttttaatatttttggaacctaaatgctaatactgtataccacaatcacttatgagtattgaagttgagatagaggaggtacaaggagaccttatctgcagaagacaaaaagccatttttagcaaaactaaagaaagaaaaaagattgaaacacaaatatgcgccactcgtagtccacccctatctctttggcaaaagccacttcactctttttccctttttat

SEQ ID NO: 5 - DNA, 1000 bp, Arabidopsis thaliana
  misc_feature (1)..(1000): Ceres Promoter PT0613
ttaatactaacattgtagaaagccacaaaaaagaaattgaaatgtgagtagatgctgagtcagaggtttggtcaatacacaacagctaattgagataatattatacacgtcacgatgacttgttttttctcctcccaacttgttaatttctttattcttaaaattaaaccatcgcaaaaacagaagaacacagctgtttttctcgactcccaatttctattttgctgctaaggacatttcatttcattatttcccaattcaggactccttagattttcctaaatttgttttcctaacttgctctctctcattctaacattttctcatttttttagattatcttgtactttttagtagattattttatcaggttttacaaacatacattgacattctaaaaagggcttctaaaaattcagtgtggaatgctgatatactaaaaaaaggtcatgcaaaattatctacgatttatctaaaattagataatttgccatatataactattaactaataatcgatcctttgattttttgtttagataaaacgaaacagctatatcttttttttttgttatcggattttaatcgaataaaagctgaaaaataacagttatatcttcttcttttttaactaatgaaacagttatatcttaaacaaacaacagaaacagtaaaatattaatgcaaatccgcgtcaagagataaattttaacaaactaataacaattgagataagattagcgcaaaagaaactctaattttagagcgtgtaaacacaaacacgtcttgaaagtaaacgtgaattacacgcttctaaaacgagcgtgagttttggttataacgaagatacggtgaagtgtgacacctttctacgttaatttcagtttgaggacacaactcaagttatgtttgatatctaaggacttgcactgtctccaaatctgcaggaaggactttttgattggatcaatataaataccatctccattctcgtctccttc

SEQ ID NO: 6 - DNA, 351 bp, Arabidopsis thaliana
  misc_feature (1)..(351): Ceres Promoter PT0625
gatcatgatcagtttcaactcgctgtgcccacgtgtcgagagatcggcacgtgcctgagctctcagccgctcataaatacacttgtttagtagcaacagtatactatagtagtcctctcctgtttggcttttagcttgcatcgatggatggatggatggatcgcatgagagggcttcgcgaaggtacggaaccttacacaacgcgtgtcctttctacgtggccatcgtgtaggcgtctcgccatgctacgtgtcccggaggatgtctcgatgccaacccttataaatactgttccattccaatcccatcgccacagccagtgcaaatctgatcgatcaagataatcgagca

SEQ ID NO: 7 - DNA, 1022 bp, Arabidopsis thaliana
  misc_feature (1)..(1022): Ceres Promoter PT0633
cccgatcggccttaatctgagtcctaaaaactgttatacttaacagttaacgcatgatttgatggaggagccatagatgcaattcaatcaaactgaaatttctgcaagaatctcaaacacggagatctcaaagtttgaaagaaaatttatttcttcgactcaaaacaaacttacgaaatttaggtagaacttatatacattatattgtaattttttgtaacaaaatgtttttattattattatagaattttactggttaaattaaaaatgaatagaaaaggtgaattaagaggagagaggaggtaaacattttcttctattttttcatattttcaggataaattattgtaaaagtttacaagatttccatttgactagtgtaaatgaggaatattctctagtaagatcattatttcatctacttcttttatcttctaccagtagaggaataaacaatatttagctcctttgtaaatacaaattaattttcgttcttgacatcattcaattttaattttacgtataaaataaaagatcatacctattagaacgattaaggagaaatacaattcgaatgagaaggatgtgccgtttgttataataaacagccacacgacgtaaacgtaaaatgaccacatgatgggccaatagacatggaccgactactaataatagtaagttacattttaggatggaataaatatcataccgacatcagtttgaaagaaaagggaaaaaaagaaaaaataaataaaagatatactaccgacatgagttccaaaaagcaaaaaaaaagatcaagccgacacagacacgcgtagagagcaaaatgactttgacgtcacaccacgaaaacagacgcttcatacgtgtccctttatctctctcagtctctctataaacttagtgagaccctcctctgttttactcacaaatatgcaaactagaaaacaatcatcaggaataaagggtttgattacttctattggaaagaaaaaaatctttggaaaaggcctgcaggg

SEQ ID NO: 8 - DNA, 1000 bp, Arabidopsis thaliana
  misc_feature (1)..(1000): Ceres Promoter PT0650
catacttaattctaaaaaaacaacacttatagtttataagcagctcttatgataaaaatctttctgagttatagctctgttaaacttgtattcaccccaaaaacggatgtttcatttcttattttttacttggagtattttattgtaatttgtaaaaaaaaatgtaaagtgggggatatcatgaaaaacaacgtcactttgtttggtcacaatatacatttgataaaataatggtcgtcgcgtgatttagttgatttttgttttatcaaccacgtgtttcacttgatgagtagtttatatagttaacatgattcggccacttcagatttgggtttgcccacatatgacataccgacatagaaggttaaatccacgtgggaaatgccaatattcaatgtttggttttcaaaagagaatcatttctttatatgatctcaaaagtatggaattgaaatgactaatgagcacatgcaattggtgctatcttaaaaaccgaacgtctttgaatttaatttgtttttcaccaaaggtacctaatgaaaccctttcattaaaaaataaaggtaacaaacaaaattttgtattggaaaaaacattttttggaatatataatttggtaatagaattatgagcaaaaaagaaaaagaaaagaaagaataatgagcataataaagcctttacagtattactaattgggccgagcagttttgggctcttgatcatgtctagtaatcttaaacagacgataaagttaactgcaatttagttggttcaggtgagctaccaaatccaaaaatacgcagattaggttcaccgtaccggaacaaaccggatttatcaaaatccttaagttatacgaaatcacgcttttccttcgatttctccgctcttctccactcttcttctctgttctatcgcagacatttttgtttatatgcatacataataataatacactcttgtcaggatttttgattctctctttggttttctcggaaaa

SEQ ID NO: 9 - DNA, 998 bp, Arabidopsis thaliana
  misc_feature (1)..(998): Ceres Promoter PT0660
caagtcaagttccaatattctaaggagaaataatagtatactaaacatacattagagaggttaaacttctttttggatttaagtgtgtatgcataggctatttattcttaagtataactattaactgtagctagatttatacaagaaatacataaaactttatgcatgtgaggtagccatgaatatacgtacatgttgcaatcgattatacatgttgtatttggatttctctatacatgttttaacttgtcattctctaagtatatacataccattaatactgtgggcatgagtttatgataagacttttcttttggagaccagttttgttttcctttccacctatatttgtctataggcttcacggtacactagtttacaagtgtttttatatgttctaaataaaattgagattttccggaacggtatgatctgtttgcaaataaggacgtatatataacagtatcaaatatatttgttgttataaggcaataatatattttctgagatattgcgtgttacaaaaaagaaatatttgttaagaaaaaaaaagatggtcgaaaaaggggagtaggtgggggcggtcggcttttgattagtaataaaagaaaccacacgagtgacctaccgattcgactcaacgagtctaccgagctaacacagattcaactcgctcgagcttcgttttatgacaagttggtttttttttttttttttaattttttcatcttcttgggtttggttgggtcactcttcaggtcaggtgtgtaaaaaagaaagaaagaaaagagagattgttgtgttgtaacccctttgactaaaatctaatgaacttttttaacacaacaaaactccttcagatctgaaagggttcttcttctctcttagtctcttcgtccttttattctccgtcgtcgtttcatgatctgactctctggtcttctcttcttcttcttcttcttctattttttcttacttcgtcactgttgtgtctgaac

SEQ ID NO: 10 - DNA, 1000 bp, Arabidopsis thaliana
  misc_feature (1)..(1000): Ceres Promoter PT0665
aaaaaggatgggtaatgggacctattttccccaacatcccacatgcacacttccctctccattctctcacatttatttctttcattctaatttatccattccgtgtgtaacatattcactaataatctcatctcactaactcattcattgattgtgatatgtttatctagaattagtgttttaacactgtgtctacatatgatttccttttcattgtatgtgaacatgttaactcactaatcattttgtattttcgagttaacatgagtctccacttcggtagactaaagtaaagataggtttgagtataataaagtttaaaatttgctttaaaatcaatatttataaataagtttttatcataagtgatttttgtatgttatattggaccttgtataaacagactacagaagaaaattatttatgagaacttgtaatgttagagtggacctcgtataaactaattatgtgggcttttaccataaactatttatgaaaattattatggcccacaccactataactaaagcccacatatttagcagcccagtttcattgtaagagacatgttcgctctggaactagaattttctggtttttgggtatttgttttcttatgtgtagagaaatgatggtaacgattaaatgttgtgtattacaatttacaatggtaagacgattaatatatttacacacaattttgttgttgctgtaacacgttagtgtgtgtgatgatagaatttcataaagctttaactacgaggggcaaaatgttaattctaaatagttgacagcagaaaaagatatgtatacataatataaggattaaaacgtaaataataataaataaggcgagttaaattaaaaccctgttaaaaccctagcttgaaacacatgtataaaaacacttgcgagcgcagcttcatcgccatcgccattctctctctcatcaaaagcttttctccttgattttcgcattctttagagtcttaacgcaaag

SEQ ID NO: 11 - DNA, 999 bp, Arabidopsis thaliana
  misc_feature (1)..(999): Ceres Promoter PT0672
cagccgtaaatcctccataaatttattttgcaagttttgctcattatataatgagcggaatttatgatataatcgtttgtaataatgttatgttttgatcaaaatttgaaattaaaagtaggtgagaacttgttatacagtgtagataaggtggatcttgaatataaaaataaaatttataagatgtatttaaagcagaaaagcataaaactttagataaaataatgtaaaaatgtgttagcatcaatgttgggatattggccgacccgaacttaatcaatgtcggaagccattacttctctcccaaaagacctttttccttcggagaactaggaacttcctcactacctttcgcttaacgtgaaagccataaatttcatatattcataaaaatcagaaaatctaaaactgtttagtatcacctgtttttggtatagactattggttttgtgttacttcctaaactatatgatttcgtacttcattggatcttatagagatgaatattcgtaaaaagataagttatctggtgaaacgttacttcagtcatgttgggtctagatttacatactactatgaaacattttaagataataattatcctagccaactatatgttctatattatgggccaagaagatatagaactaaaagttcagaatttaacgatataaattactagtatattctaatacttgaatgattactgttttagttgtttagaataaatagtagcgtgttggttaagataccatctatccacatctatatttgtgtgggttacataaaatgtacataatattatatacatatatatgtatatttttgataaagccatatattactccttgacctctgcccccatttccttttactataaataggaatactcatgatcctctaattcagcaatcaacaccaacgaacacaaccttttccaaagccaataataaaagaacaaaagcttttagtttcatcaaagacgaagctgccttagaa

SEQ ID NO: 12 - DNA, 1000 bp, Arabidopsis thaliana
  misc_feature (1)..(1000): Ceres Promoter PT0676
aagatagtacagtttcagtgttttgagaaaaaaagctgaactaaaactaaaatgtttaaggacacaatatttagtttcaattagataattcaacagtttgaacaattttttttttttttttttgaagtcatttatttatacaatgttttaaaacgcattaagcatttaggcagccgacaaacgcctattgtctaactgtaaataggcgcttccacttaggttcatattgcatatttactatatgtgtatagtgacaaaaaccaatatttctcttattttggatgaaggtatagtagttgttaaatgttcaatataattaagcattaatgacaaataaaataaaattaatttagttgataaaaagataatcttataaaaagatcgatgaatagatataatggtttactgaattctatagctcttaccttgcacgactatgtcccaaggagaggaagtaccttaactataattctgaacataattttgtctatcttggtgagtattatatgacctaaaccctttaataagaaaaagtataatactggcgtaacgtaataaattaacacaatcataagttgttgacaagcaaaaaaacatacataatttgtttaatgagatatattagttatagttcttatgtcaaagtacaattatgcctaccaaaattaattaatgatttcaacaggaagtctgagatgatgggccgacgtgtagttacgtttcttgaattgtgagagatggtatttattatactgaagaaaacattatttactaaataaattttcatttcacatcttctgtaatcaatgcgggtagatgaagaagttgttaatacgatggccaaccatatggatctcttttttggcgtttctatatatagtaacctcgactccaaaggcattacgtgactcaataaaatcaagtcttttgtttccttttatccaaaaaaaaaaaaaagtcttgtgtttctcttaggttggttgagaatcatttcatttca

SEQ ID NO: 13 - DNA, 998 bp, Arabidopsis thaliana
  misc_feature (1)..(998): Ceres Promoter PT0678
aattaaatgaaaccgcccctaaattaggagggatttgggtaagtggtaacacattcactggaaacatgtgaagaaaggaggatgtcaagtagctgaaaactcagtatagtaaccaacggcttctcaccaacctttcattaataatttggtcatccctatatttttattcaacattttgtttttcaatagcttagagcaccttaatacctttcagtgtttttttataaaaaaaacaaaaattgggattaatcatcaatccccaaatgtaacgtttacttagattatgttcatttttctatacacacaaatcatattcttttgttttaatcttcgaaaaacgagaggacattaaatacccctaaaaaaggaggggacattactaccaacgtacattaacatgtttgatagcaaacgatttattttgttcgttttgaaaaggggaaagtaatgtgtaaattatgtaaagattaataaacttttatggtatagtaacattttcgaataataagagagggaaaacactcgccattgtcggcaatttagaaccaatattagaagggtttttttagagaaaaaggacttaaaagtttagagaccttaacaacaacttatttagaaatagacatgcttaagttgacaacagcgagtttattttctatatcgaagaaaaatacgaactttttcttaattagatttcgaatgcatgcactatcgagaatcgaccgtcacaagaaaaaactaatatacatactgtacatatctatattcaatattggtggggatgggtttaatgtgtatttataattcatggataaattcacacaataaggtccatgaaactagaaggtaccaaaaataagcattaatgactctttgccacttatatatatgattctctcatagtaccattttattctcccaaacctatcttcttcttcctctcttgtctctctcgctctctctcttctacattgtttcttgaggtcaatctattaaaa

SEQ ID NO: 14 - DNA, 1000 bp, Arabidopsis thaliana
  misc_feature (1)..(1000): Ceres Promoter PT0683
gattgaatgatgagtgtgcacccttgtattactaataaaaaatttagcaacagttataagctaacgtcatccatgagtcattcattagattcactatttgcgttctcaaaaatcgaattgttaaaatttgagaagctctaatatacgagtcaatgagatgtggcaaaagcatgtccttgaccataaaatttcgaggggtcaactcattagataaggacaagaatcaaccaattgaaggcgtcttctataacaagtttctttattactaatattaaagtccaatggggtgagggggagaagaacttaaataaaaggaaataattggtaagtgaataaaatctaaatacgatactagatgattgatttgtgctagtgcatggtattagatcagatatgtgttactattcgaattcaaattggcatattccatgttgttgataagaaaattgtagaagtgtaaaagctgagttactatattcaaactagtggtttacataaagtgagacaacaactgtttcacaaaaatgactataaaatagtaagtagtattaggtcaattgattttaaaattttaatcaaattcaaatttgtgatataatcaaatttgtttatagaaaatgttaagaaatcaattttggcagaactaattcagtgagaaacaatcatttacaaaaacaattttaacattatttaacagtaagatttgacatttaacccgttcgtgtgaacccatcatatctaacatggctctacccatgacgcctccatgccatggacaattttgacagatcagaagttctgaacgtggacgaggtaagaacaccatgatgatacgattggagttagttatgtcgccaccgacatcactgccaatctcattaataaaagtggtactaaatctctaatctctattaactataaatataacaaagaaccaaaagaaagtttcttatctctcttatctttcataatttccaagaaacacaaaccttttctacta

SEQ ID NO: 15 - DNA, 1000 bp, Arabidopsis thaliana
  misc_feature (1)..(1000): Ceres Promoter PT0688
acgttcagaggcatcgcttttgtacaaattgaagcgggtttgttcaatatttaaaataacacaggaaacattcaaatgtattattgatgttgcttaggtttgtgaaatgatatgaaccatatcgtatatattactagatttttcttatatgttttaagggtagtggggctgacctatcattctgtttggcattaccaatcagactatcagagtattcaccattcaggattccataactagaaaaagaaggggtttacattttctcatactgtataattttctactatcagagattttatcgattacattaatctcatagtgattattctgatttataaaaaagttgacaaaataattaaaaccagtattttataacaagattgtctctctcccatggccattattttgacctctgacttatttaaatcttaattaacagcataatactgtattaagcgtatttaaatgaaacaaaataaaagaaaaaaagaacaaaacgaaagagtggaccacatgcgtgtcaagaaaggccggtcgttaccgttaaggtgtgtcgaactgtgattgggccacgttaacggcgtatccaaaagaaagaaagggcacgtgtatagatctaggaaaaaagaaagaatggacggtttagattgtatctaggtaccaggaaatggaacgtcacaccaaacggtacgtgtcggatcctgcccgttgatgctgacggtcagcaacttccccttattcatgcccccctgcccgttaattacgtgtaacccttccatgcgaaaatcaaacccttttttttttttgcgttcttcttcaacttttctttttaaatcaaaccttttctttttaaaatcacattgcatttcctaacgctcaacaaaatctctctctactaatatctctctctctctctctctattgttgaagaagactcataatcggagattgtttgtttttggtttgctctgtaaattggagaagttttgttagagatcaa

SEQ ID NO: 16 - DNA, 1000 bp, Arabidopsis thaliana
  misc_feature (1)..(1000): Ceres Promoter PT0695
aacattttctttaacttactcttaaattttaatagtaagttgatgcatgttatgttgatccgtcttgatcacaaatattgttttatggacgaattctttgacagtaaatggctatagtgactcagcttggagcatcccgatatgaaaacaaagtgcagtattgtgtcgtggtcatcactaacgcactttcctagaactatcgcgcgtgtttgacctatgcaacacaccagatgtcatgaacgtatacttaaatagaaacaatgatatagacaattggctatattctgtcatggaacgcaaaccggataacatgtctattagattcatcggacttgatcatggttatgtcttaatagacgaattctttgttaacgattggttaaaacggctcacgttagagcatcctactatgacttcaaaattgataaatattacatggaaatcactttaattttagttagaaggtagttaatttagatattcttatttaataaattaaaaaatagaagaaaaaaagatgagaagagtttttgtttataaaataagaaatatcttttattgtaattttaaaattaaacaaatttaatttatattaaaattatctttgttttattgttaaggcaataattatttttttggtgggaattgttaaaacaataattagtatactgttaagtggtcctttaataataagataacgtgatttaaaaaagaacgagacaggctaatatagtagagaggaaaaaatacaatttaggcccaataaagcccaatatagagttgtgctcaaacacaggtcttcgccagatttcctatgacgccgtgtgtcaatcatgacgccaagtgtcattcaagaccgtcacgtggcgttgtttctacacataggcgatccatacaaatcagtaacaaacacgaaaagagcattcatatgtacgaaagtagaaaagaagagactctttgtgataaaactaagtaagaaatagcataaaagtaaaaggga

SEQ ID NO: 17 - DNA, 1000 bp, Arabidopsis thaliana
  misc_feature (1)..(1000): Ceres Promoter PT0708
gtttccaaaactagtattctttatttgctctattcattatatttttatatttgtaacgtcccgaccgtctttattaggtttcgacaatcacttctcggaaggtcgtccatcctgaaattactctatcctaaacatgtttaactataaaattctctcgaaacttttgtaacgtatataaccacataaattctcttaaacttatttgcatacaccattatatttctgaaatcgatatgttacaatattatttaatatttagattacttttactgaatcgaattaaatatcaaatcgaaacaaatctaatctaccaaaaataattttgttataaacatttcttgcctagttctacctcatatacattttagttaaagaaagaaatcacaacaattcccataattcaataattaaatccacaaaatcttggagtaagtaagagaaataaaaagatagtatcttaacataaacaattcaaagatgctctctcacacaattcacacacacttacaaaacaaaagacagaaacaatgttttcattcaaatcaaaagaagttataacactagtacaaaaaaagctcaaattctaatagtaactctttttatttcccaattacccaaagattctctctcacttcacaaaactagctttgagagtcgtgttccacaaaatccattaaagctgaaacggttttgctcaccattcaaacaaatacaaaattgcaaaaccccaaattataacaaaataatataaaaattaaaccgctaaaaagagtgaaccaacaaaaatcgccgaatgtgtgtgtaatgagaaaaccgacccatcatcccaatcatctcttcccgtgtcactctcttcctctcccacgtttcttctctcttccctttatgggttttaacttctccttcttcttcttcttcaatcttcagttttcaaattcaacaacaattcacattttgatttcttcatcatctctctctctctcgcttctctctcaaatcg

SEQ ID NO: 18 - DNA, 1000 bp, Arabidopsis thaliana
  misc_feature (1)..(1000): Ceres Promoter PT0710
tagtgcgcgtggggagagggaatggtgaaaccttagtggttaagttatgaggaaaatgataaaaggataaaacaatcaaatgcagcttgaaacggccataacataaagtaccttatggtggtgcgaatatttttgtgtttctttcactcttttattgctgaaagctacgacacttgtcttaatatattgtttccgcaagtcacatgatctactttttatttaacgtctagaaacgccgagatatatgatgattagtatatcacgtctatgcaaattgttagttcgtgtttggccaaaagatatcgagacatgtctgaagaaccgagtctggttttgagatatttcttcaagcattactatacaatagaaaaaggagacacgcgaatatgataatagcaaaaggcataaaaaggcgaaaattaaagaaaaacgtaaagtgatttggcctcaatcaacgggaacgtatcttaattttagaggttcttcttttacttttgagacgagagagtttgcgtctttgcgagctgctttggttgactaaacattatcatattgaaaaccaaaatacaacggaggaatatttgtcacagtttcactttcacattgtttccttaacgtttaatcaaccttgttcaaaatttctatagttgtaatcatcattgtttacaaaattttcgttcaaagatgattttaaataaaattgtgaaagaaaaccttttctgaaataaggattggatgatagtgttaaaagaaaaatatgaactgaggcaaaaagaggagtggtccccggaagattgtgaaatgtgtcatctaaaccagccagacgtagtcacgtgttctctctagctttatgaacttccttagccagcaccatcattgtgattgtagtatatatgtaaccctaccttcatctctcccattttccattctccatatagactcctttacaatatacaaaacctatccaaaagcgaagaagccaagcaaacatattataaaa

SEQ ID NO: 19 - DNA, 1002 bp, Arabidopsis thaliana
  misc_feature (1)..(1002): Ceres Promoter PT0723
gtcatatcttatcaacacgtcaacgatcaaaacctttagcctattaaattcaacggcttagatcaaaacgaaactaggtgggtcccacttttaatatcgtggctgcataacatttcctcgataactgaagccgttgtggtctttctcagaatctggtgcttaaacactctggtgagttctagtacttctgctatgatcgatctcattaccatttcttaaatttctctccctaaatattccgagttcttgatttttgataacttcaggttttctctttttgataaatctggtctttccatttttttttttttgtggttaatttagtttcctatgttcttcgattgtattatgcatgatctgtgtttggattctgttagattatgttattggtgaatatgtatgtgtttttgcatgtctggttttggtcttaaaaatgttcaaatctgatgatttgattgaagcttttttagtgttggtttgattcttctcaaaactactgttaatttactatcatgttttccaactttgattcatgatgacacttttgttctgctttgttataaaattttggttggtttgattttgtaattatagtgtaattttgttaggaatgaacatgttttaatactctgttttrcgatttgtcacacattcgaattattaatcgataatttaactgaaaattcatggttctagatcttgttgtcatcagattatttgtttcgataattcatcaaatatgtagtccttttgctgatttgcgactgtttcattttttctcaaaattgttttttgttaagtttatctaacagttatcgttgtcaaaagtctctttcattttgcaaaatcttctttttttttttgtttgtaactttgttttttaagctacacatttagtctgtaaaatagcatcgaggaacagttgtcttagtagacttgcatgttcttgtaacttctatttgtttcagtttgttgatgactgctttgattttgtaggtcaaa

SEQ ID NO: 20 - DNA, 1001 bp, Arabidopsis thaliana
  misc_feature (1)..(1001): Ceres Promoter PT0740
tgtggccactaaagatttacccttaaccgggcccatataagcccacgtcaagtggcgcttatacgctctccgtaagagagccaacatttggtatgtaatgttgcaaattattcttcaagacaataaattcaaatataattcaatattgtccaaatatagtgatgtacttcagttgtgcacatagaaactccactaaaccaacttttagatagatgcattcacaaattttcaacaatgtcgcgaaagtctaatccatcaccagattctaacattttaattattatatttaactatacatactctaatcagcatgagtcaaacgtgtacaatagcccaagcatataataagaccaaagtcaaactcaaataaatgtctccaaactcaaaacttgaaaaagacctaattattacatggtagatatgactttgtcgacaagtaaaccaactaatcctcgaagctaccttctcttcccagttattatgtgtgatcgatttataaatctcttcttctaataacacctatatttttcttatgatgtgaataaatataaaacttttaactttaaaacatatttatccgaaatattgcacttagatttcaaatagataaataatagtactatctaactgatattgaaaagacctaacacggaaaacagttttataaaaaatcccaaatgtgggtaattatcttgatttcttgggggaaacagaaaatggattaagattaatcggagtcgtgtcaagcagctcgttaataactgtagcaagttgactgagtaagcatcaacgtgtcatctccgtaaagcccattatttctagtctcgccgcgtcttctcttccacgtagcacttcactttttctctccttttgtttcctttggaacacaaacgtttctatttataggaataattacgtcgtccgtatctgtgtcggaacatagatccaaattaaaagcgacttacttaattacatatcgttcgtgtttttttcttcaaaaa

SEQ ID NO: 21 - DNA, 1024 bp, Arabidopsis thaliana
  misc_feature (1)..(1024): Ceres Promoter PT0743
tcgattggcccgatcggccccaaaatcaagctgagccgcttcaaacttcagcttttgaaatcacccccaaactcatgtcctcttatcattataactaaaggatctttcattttatttaactcatcgtcttgcactacccaacccaaaggttccaactatacccgaagctttctaaaggtccaaagactttttttttcgagccagactattcaagccaagaaaagccaaaccccacaagccagtacttttcaattccatattataaacttatctgtcttgttttagtcccactaaaaacaacagaatttaatttaggttgagctaaaacccttgacaaaagtgtatagtcgtcgattcagtagcacactcatcactcatcagatttgatagttgacctaaagtatgactactccatttcaactaacaaatgaaaataaaagagacctaagggttagaggattgaaactatactctcaagtcttttatcactaggctactaccagctagttaacttgatggatttaagcaagaaaacgtagaatttatattcgagcagattgtttagctaaaaaagcttgggtttgaaattgccttttctcccatataagcacgtcggttcctaaataactctttctagcggagagtgtctttccaataatttaataaaaatggtgtttgtatatcaaaaaaaaaagaaaaaagaaactgatcgagatagaacgtttgcagttttataaacaatttaaaaaacaaaaaaaattaaactcaatgtattttttattaattcacaaacaataataaatcataggatcgaatatttacacggtatcaaaacctactcgccgctactatataaaaattgaagtcaaatatcaaccgcaattattaaaccagcaagacaataattcataaacttaatataaacataaataaattaatgttacacaacgatatatggtgagggttattactatcttcttcctctcaaaacacatctcctaaccttaagctttagacggcctgc

SEQ ID NO: 22 - DNA, 1000 bp, Arabidopsis thaliana
  misc_feature (1)..(1000): Ceres Promoter PT0758
agctagccacatcagtgaccaaaaaagataattaacaaaccaaataaaataacaaattttgatcatttggaataaaatttataaaaggaacgaaagcgccttctcacgggtcccatccattgaaatatattctctctttttgctctatataataataacgcgtactaatttgtagtatatattattacaaagtcgatatttgattgttttgtgaacgttgatatattaattttcttggatgatgacaaaaaaagtcatagaaagtaacgtgtgaacatagcattaacaaaatacaaacataatatataaccaaatatatgaaaataggataaaatctcattgaatagatcttcttctattcaaatatataaatatttgtttgtctataaaattaacagagcattcacattatctaaaataatagtaaaatcaaaataaaactaaataaaaataactctggttttataacgattgattttaaatattagtttttgttgtaaagagatcattatatatgtctgtaatatttttatactgagttacatgatatttagttattatagcgtaattaactaagataagaaattaactaaagtgatattctgattattattatttttgttaggacacgtacgtggaaaaactaaacactataggttacaaaacggtataataaactcaccattactggaaaatgtttgcatttgactcaataagtaacttattataagttactgatataatgcatagttttgaaattcttaaataaattattttggtttcgcatgaaaatatgaaaggagagaaatttattattgtcacttatatatatatacatcgtaatcattttttcgtgaataattctctctcccattccattatttctcagtatctctctttctttcccttactttattgttgcttttaaaccttcaatttgctcataaaccaaatatataatatcaaaacaaacaaacaaaaaatcagaattcccctaata

SEQ ID NO: 23 - DNA, 921 bp, Arabidopsis thaliana
  misc_feature (1)..(921): Ceres Promoter PT0829
aaagttttgaattattgggaatcaatttcgaagttttgtaattctttgggggctaataggatattttattttcttggtttcgtctattgttgtttttctatttatggttgggcttttagaactctggacaggcccatgtcatatgttttcccttctccttatatttttcatttttcattttgttaaattaatgcataatatccaaaaacaatttaaatttttgaaggaaccctttagttacggctccgaagctttcacaagtgagaatgtgagatcaaagaaggcaaatggaggattttaaaagttaaaatcatcttttatctgcaaaagttgacaatttttttgtatcaaatctaaatcatcaaactctcttaaactacaagagcataacaacctctatgtaatccatgaaataatctgcttgaaggacataacataaatcattatggctagagtgactaacttcaatcaaatcctcttaactctagctcccttacaatggtatcgtaaaacattatgcattagggattgttgtcctaggaaaataaaataaaaatccccacagaccaactaccattttaacttaaaaataagcttcgtccgcgacgaattgttttccatcctaaaaatagaatggtgtaatctgctaatggtttagttccattaacttgcaagttctattgaaagcctaaatgtcaataaagatattaaaattcggagtcaaaagacaaatgaatcaaaagcaacaagacaagtcagctccattcttcactacccatcttttacaataaatcatctctcttttcacaaatttcaaactactctcattgccctttagctttgttatagagccaacactacagagagactcacacacttgtttcaataattaaatctgaatttggctcttcttataaacta

SEQ ID NO: 24 - DNA, 763 bp, Arabidopsis thaliana
  misc_feature (1)..(763): Ceres Promoter PT0837
aactacaagggagacataatatcaccatctggttcctgttatcatctgaagatttcttgttttaccttccagtgataaaatgatccttataatacatatagatatattaaattgctgtattttaagattatagatatataaggtacatgagagtgtttatttaaaaaaattcacttggaattcatgttttgtgatacgttagattggaatccatttgggaaaagaagaatcatctgttcttatgtctcaaattttgacttcattcacttttcttcttgtcttttaagaaagcttccacaatctaactgttcgatgtgaaaactgagattcgagtaagaaaatgtgaactgtgttatactgttttttaattagataatttagattgcactcagataaattaataacattcctcgaatacttttatgtgattggatatattaggtatatctgccaaccaaccaataaactgctatgtttaaacaaattaaataaattagtatatgtttactcaagaataaagaagatagaaaagaaaattctatatgagctaaatttgctggaggaggcatcggacgtgggtaccagacctttccaagcacacgagtagtgcttagccatgtcatgctaacatacaccatttggttcatacaaaatccaaatcaaaatctatttttaaaatcttttgcacacgtctttgaaaaacacctctcatactatagctacggaagcttcaatttcaaggtttgtctaaaagctaacgatt

SEQ ID NO: 25 - DNA, 751 bp, Arabidopsis thaliana
  misc_feature (1)..(751): Ceres Promoter PT0838
atactggtatgcttaaggttgaagccaagatctctgtcttacccaagtaaccactttctattagaagggatcaacactaagaatatggagatttaagcctaagggctaaggcggttctcaacaatacatgatgtgaatacaatcacagacgatttactgaggtttgttgataagatcttgatcagtctctgcatcatctgttcaacaatctcaatctttgactgtttgctttcggagccataaacagaggaatcccttattccctgttataggagcaatacaccaagtattatttccatggctgaaattctcttatggaaacctaattgttccattgaagctgtaaaatcgaatctggtgaatattctcgagcaaagccgcatgctaattatgtcaattcagaagagtttgattaggagactcgaagcgagtttgatgatctttcttgatgttcaactccgattgtaagggtataattgacttttcatgtattacggctccaccacctgacactaaggcactctttgtccatctcgttggtatcatcggattcggatggtaaaaataaaaagagcagaggaaacttgttactcatgcaagcttctcaggtgccacgtcactccattacgtgtcatcttcacacaccatctcgctcaaaaccgatctcatttttcaaaccttaaaggcagaagcaactgattaagttaacactcttgagaagctctcgattaagcttgaacttggaggatca

SEQ ID NO: 26 - DNA, 669 bp, Arabidopsis thaliana
  misc_feature (1)..(669): Ceres Promoter PT0848
tctctttaaatcagttaactaaccgtttatatatttacgataaggtttgaagagattattgataaaataatacatttcataatcccgcgttcaaccgtttaaagtaacatttaagttgactatatctaattttttttccattaaatatggagctggtaaactttatcaacttctaaaaagtgtaacaacaaaaattaggtcaatcacaattctgttttttttattattttggattgacttccaattgcaaatagtcttagtgatcaccattatcatacatatatacatcaagtaggtttcatcatgatataccacaaagtatttgacaagccatatggttttggatcaaaaagtcggtccaaaattaatgttttatgtgcaagaaccgacccattgtacacacgtgttaacatcttcaagactttcatctctatttttcttttggtcattaagatacccattgatccgaatctgttacattcccacctacttttttaatttttactatccactccaaattaaacacaaccgatgattttaataattggaagcttttaaaaatatttcaaaacaagcctctttgtgtttgtctatatatatacacgtaataagaaggtgaatgaatctcacagcttacttgttctaaggcttccaataacgaaaacagta

SEQ ID NO: 27 - DNA, 702 bp, Arabidopsis thaliana
  misc_feature (1)..(702): Ceres Promoter PT0863
cgggaaacgacaatctgatctctagtccagtcgattggcccgatcggccgattataaacttacatgagacaagtataaataattattataaacttattaagtttaagatcaaggcttttgtgcaatgtatcaatgaatgttagatgtgatatgatgaaagcaatgttttaaacacatacatagtcattgatcggaatgtgtgttattagaaatgcatgcctaagccgatagggttatctatgtttggtcttggacattatagccaaatttcgaatctaattcttccaatatatatttttttttttttgcttagggccactactagtattgcttatcaattttaagagctcatgaaaatgcaacaatatagtagttgcaaatccttgtttcaagagaaatcaaagggccacttgtgaattgaataataataatatttgcaaataacctttcactaaaccataccaacaaaaccacacagatttggcaaagacataacctttgggagacgtgaaaaggctcaaaatttgacaattgtccttacaaattcgctcattagtgcaattgtgagatttgtttgcatccaaatccaattcataactcacactcgtctcaaattcgaaaaggcctgcagggccagtgcactgggatccaacaatgtcctccgactcgtccaagatcaagaggaagcggaaccgcaccgcg

SEQ ID NO: 28 - DNA, 435 bp, Arabidopsis thaliana
  misc_feature (1)..(435): Ceres Promoter PT0879
ttctaggaagactggtcaagctaagctgtttctgttttttgtttttgtactttactttttgtttgctagtgggaactgggtttattgggccttgaagttgataaaagatgaataaaagacatatcgcctaaagcccatatgagaagcagaagacaaaaacctccaactttgggcataaattttgattatagttaaaagtccagacccaatttggcacctggcttagttacgattctaaggcatgacacctgcctaatatgtttattacagaaaataaagagaatcagctaggtgtcccttattgaacacattaacaaactccaacgacactacgtgtcttcgtgactcttactatatccaaaaacctatagctaaagctgaattttccatgattagtatagtcccaaccaaaaaaatactgaagaaggcataagc

SEQ ID NO: 29 - DNA, 397 bp, Arabidopsis thaliana
  misc_feature (1)..(397): Ceres Promoter PT0886
agtgtatttgaaaacgacattgaagaattaatatatttttttttaattttagttttttatagtacaaatattaaaacaaacaatcctaccatatcataacatttgtaaataacattttaagttttgttttgagttttaattaattttctatgacaaaaaaatgaagtcaatagactaagtgaatcatatagtataaataaacacaatttaaatagtttcaaataaatttagaaagaataaaacaaatagaaatcagaaggtgtctgtttcctcctcgcaacatacgatcaaagagaaacaacttgaccctttacattgctcaagagctcatctcttccctctacaaaaatggccgcacgtctccaaccttctcccaactccttcttccgccatcatc

SEQ ID NO: 30 - DNA, 1024 bp, Arabidopsis thaliana
  misc_feature (1)..(1024): Ceres Promoter YP0007
agcagaacaactatatttattgtgtcacataaatctgagatcatttataaccaccaaagaacctatacacagtaaatgacaaatgtatctccctctatctctattgcccatatgtagatgctaaagtaagatttctcttttttttaatgtacttttttttgtataaagtatattccataagaaaaaggaaaagcttgtttatggatcaattgaccccaaaaaaagtttttagatcaaagcccaatataaaaaaaaaacacagtagtgacacaaaggaacttaaataaaccatgaattgatctataaacagtagagatcgataaggcgaacattttccatgtgaagtgtcttctttcatctataatatttttgacatccaataatttcctctataatatcattcacataattgatagaaacattatgttagaattgtccacatcatttgagctgtaatatattctgttttaacaaattatatggtagttgcttaatcttatgtccatcttcttctatgcatcgttttcgcgcctagttgtccagtccatttcaactacctacctctaattcttatcttaaaacaacattttttaatttaagtattatgctcaaagactaactagatagaaaaccgttattaaacattaaacgaattaaaagtcttacatggaaaatgtaggtttataaaccacgagttatgattgacaataaaaaaaatgcaaatcatcaatcaaaagagacttgagtgcgactctatatcaaccattgcaattaaaattatctatcacaaaaattttagacagattaagttaatttagtctaaattcactaatttattttctataattagtaattaactatatttatttatttacacattttctgataatttagaaatttgcatgaataacaaatataagattttggaaattagtagcaaatttaattaataattatttttgcctaaatgaaccaaactataaaacctccacatacaccagtcatcaaatttacagagacaaca

SEQ ID NO: 31 - DNA, 1000 bp, Arabidopsis thaliana
  misc_feature (1)..(1000): Ceres Promoter YP0008
ctcgagagatgaagtcttagtaatgtttgaacaaacaataatcacgttttccatcaaattcgagcatttaaagtttatattactacatgccccaagatgataccgtccatctcatccgaaaatatttctgaaattgcgctaagacaacaatgtttgctcaaattcgatcatttaaagtttacaaatctctcatcaatcttacaaacttctcacactaaacagaggtacatattttcttataaagacaaaaggttcgaacagctggcttctcaactcgagttgtttgtcagggcctctcttcactaactacaagttggtacttcaaatattggtggctagcttcacgtgatattgtctacaaattaaacccatgaaaaagctgcattaattgttccaagtgaaccctgaggagtgtcaatagtctttgctttagtgtgatcattaaaccaaatctctaaattcctaatttgtactaacatttggaacgtatttcctactcttctccctgctccaactcccaaaaataagattagttagatttctataactaatatacatgtatactcccaaaaacagtaaaaccatattaataaagctaattttgcatagatttatttcggtaaaccggcggttcaagttggggaaaaaaaagacaaacggtctaaagtcatccaaagacaaaaaaccaaagacaagttgagagagacgagaccaatcacaacattgcttcgtagattgcgtgacatcatccttgacggctactttcatttgtgtcttatttggataaaacgcacgtgtttaattcacgaaccttcatagcaataagaaatttccattactttcatattttcaactttttttattacccattacatgcttaaaatattaattcacaagtctttgtcaaaattcaatattttccaggttcatgaaccctttttatctcaatctactctataatatctccctataaattacaacaaaacctctttatttttca

SEQ ID NO: 32 - DNA, 999 bp, Arabidopsis thaliana
  misc_feature (1)..(999): Ceres Promoter YP0019
gatataagtagaatcattttttgccgccgtttctcgctaacacaccgaaaactgaatcaaatctcctagctcttctacgcaaaatcgagtgcatcgacaatggcggaacgtggtgtcgaacgtggtggagatcgcggcgatttcggacgtggattcggtggtcgcggcggtggaagaggtggtccgagaggtcgtggtcgccgtgcaggtcgtgctccagaggaggagaaatgggtgccagtgactaagcttggtcgtctcgtaaaggaaggtaagatcacaaagattgagcagatctacctccattctctcccagtcaaggagtaccagatcatagatttactcgtcggtccttcattgaaagacgaagtgatgaaaatcatgccggttcaaaaacaaaccagagccggtcagagaacgagattcaaggccttcatcgtcgtcggagatagtaacggtcacgtcggattaggagtcaaatgctccaaggaagttgcgacggcgatcagaggcgcgatcattctcgcgaaattgtctgtggttccgatacgaagaggttattggggtaacaagattggaaaaccacatacggttccgtgtaaggtaaccgggaaatgtggatctgttactgtacgtatggttccagctccgagaggttctggtattgtggcggctagagttcctaagaaggttcttcaattcgctggaattgatgatgtctttacttcttctagaggatccaccaaaactcttggaaacttcgtcaaggtatgtactttcacaatggctgttttggtttgatgaactctgaattaggcagtgaaaaagtaatcattaccagttaagtgaatttatattgaagattaggatttagctgattgtattggtttgagcatgtgagtttgtgtttaagattgcttgaattgaaatgctttaggttgtttgattacgctaaattctgactaatgtaattcaaattgttgttgtttttttttggtc

SEQ ID NO: 33 - DNA, 1024 bp, Arabidopsis thaliana
  misc_feature (1)..(1024): Ceres Promoter YP0028
gtcagtgaagtcgattggtagtacttgaaacacttggttggtttcatgtatttggcctatatataaacaaacatcgtaattatatacggatttttttcggaattttacgccatatctgtaagtatatataacatgcatgtcgttttcaaattcatatgatgaacgatccacgtaagtgctactactcctacaatattgcatgagagagatatgtatttataaattttattttgaagaagaaataagagggaaggttacttgggtggatcgatgtgaaaacaaaagaagaaaaagcgaaacccactaagccattacatgatatcgaccttcttatctttttcctctttattttatttttctcatcttctttttgtcaggacttttttctacttaatgaaacctccaaactatctaactaatacactcccatgtagaataaagaaaattatataagatattgttgatattttgtaactagaaaatatatttgctctgtaatttttcgtaagttaaatcaacattttaaagtagaaacaaatattactgcaaaaagtaggatcattatttttgtccaaaatctcagttagctatagggttgtagtaaaaacaaaacacattcttgatttgccccaaaaaataaagagagagaagaatattgttcaaaagtggtctcttctctctctaattatgttttcactaaacccaattagattcaaacagtctacaaagtccaaaagataaacatgggacaacaattcgatgcaaaaaatcctcttttcatgctctttttttattctctagtcttttaaattactaataaaaactcacaaatccaccaaacccattctctacaactcaccttcatctagatttacccactcccaccgagaaacacaagaaaaaaaatatacatatataaatatacaagacaacacatgatgctgatgcaatatacacaacaaagtattaaatcttagatattgtgggtctccctttcttctattcattttcttattcattaaaa

SEQ ID NO: 34 - DNA, 1024 bp, Arabidopsis thaliana
  misc_feature (1)..(1024): Ceres Promoter YP0039
ccgttcgagtatttgaaaatttcgggtacacccgcctaaataggcggaccttatctagtatatatatacatttgaactatattgtttactttttagttgatttaggctatgtcatgacattgacataaatctacctgttatttatcacgtgtaattcgtgtaaagtgtaaactagaaagttcaaatacgtatttgtttttgttctgttatataggattgtcatagttgtaaatctacaatttattacaacatgaataagtacacaagcaatgtaattggatttaattgctaaactctttacatggtcaatctaaatttgataagaaatacgtcacatattactaagactgatagtttttttgttgtcaccaattatttttgttaaattgacgaaaacaattccaaaaactcaaatgtacaaaatcatacagtctcacaaacatctcatagagaaagatataaatctcccatatgggaacgataacacgaggtcgaaatactattcgtaaaactaaaacgccttagttataaatcgttagttgtaaccgcggtcgagaatacatacagatccacgaaactactactacacatgctgctgaattggaatttggaaaagaccatcttctttaggaagagctcacccaatgagtgacaaaggtgtcggtggcttgttttctacccatatgtatacatcaaatggtagtttcattaacgtttggttttgagaaaagtaagactttggctagtagctaggttcgtatataataaactcttttgagaaagttcatcactggtggaaaatgttaaaccggttttttctcattttttccgccatgttaaccaccggtttaaaaagaccgtaacacattgaaagattaataagggtatatttgtaattacggtttgctggcaatttttaattattattttaattagagaaaatagagaagccctatcaatgtacatggtatatatataaaaggcaaaaccctagaaaacgatactattcgactcagccgtcctt

SEQ ID NO: 35 - DNA, 1024 bp, Arabidopsis thaliana
  misc_feature (1)..(1024): Ceres Promoter YP0050
aatctgatctctagtccagtcgattggtacttgagggaaacatcatatttttaaaccttgtctcagtaagctaacacacaccccttgtgattacttatccatgtttatccacaagaatgcagttggattgagatattttcttctttgttgaaatcaggcctcaaggtgttcatgtggtctgcaaaaaaattcccaaaaataaagatagtgacatctgaaatcgataatggattagacgaagagtttcgtgttattccttggtatgggcgggtttggggacagatattttggcacagacgaggactaggccactgtggtcctgcagcattaggtgtcccttccatgtcctgcattacattttattgatggattcatcaccctatctactacaacggctacacaaactatgaagagttttgtttactaataaatgcccaagtgaggggtcgatcgaacccgggacacgtttttcagtttaccatatagaattatccttggaacccttgatactccatagaacatcaccacctctgttgtcatctcaggaatccaggttcaaacctagtctctctctccctagtgggaggtatatggccactgggccaatgatgacaaaatgcaaaaaaaataaaatacatttgggttcattatctaaaatatctcttgtgtttgtaagttttggttgcacactcgtgtggttgaagtgtgtgtgagaggtactatacaatacactctgcttttgttttgtacctatctctttctcttctccacatatccaagactttggggataaagctgagatcattggttgccatttggttgtgtagaagcaatcacccatttgctttatccgaggttgataaatttcctcgggttctccttctgacacgtatgacaaattctaatagtatattcctcgtagatattacctatatattctcaatagttgcaggtacttaaggctttgtcttggcatcctcgtcctcttcagcaaaactcgtctctcttgcactccaaaaagcaa

SEQ ID NO: 36 - DNA, 999 bp, Arabidopsis thaliana
  misc_feature (1)..(999): Ceres Promoter YP0086
cttatcctttaacaatgaacaggtttttagaggtagcttgatgattcctgcacatgtgatcttggcttcaggcttaattttccaggtaaagcattatgagatactcttatatctcttacatacttttgagataatgcacaagaacttcataactatatgctttagtttctgcatttgacactgccaaattcattaatctctaatatctttgttgttgatctttggtagacatgggtactagaaaaagcaaactacaccaaggtaaaatacttttgtacaaacataaactcgttatcacggaacatcaatggagtgtatatctaacggagtgtagaaacatttgattattgcaggaagctatctcaggatattatcggtttatatggaatctcttctacgcagagtatctgttattccccttcctctagctttcaatttcatggtgaggatatgcagttttctttgtatatcattcttcttcttctttgtagcttggagtcaaaatcggttccttcatgtacatacatcaaggatatgtccttctgaatttttatatcttgcaataaaaatgcttgtaccaattgaaacaccagctttttgagttctatgatcactgacttggttctaaccaaaaaaaaaaaaatgtttaatttacatatctaaaagtaggtttagggaaacctaaacagtaaaatatttgtatattattcgaatttcactcatcataaaaacttaaattgcaccataaaattttgttttactattaatgatgtaatttgtgtaacttaagataaaaataatattccgtaagttaaccggctaaaaccacgtataaaccagggaacctgttaaaccggttctttactggataaagaaatgaaagcccatgtagacagctccattagagcccaaaccctaaatttctcatctatataaaaggagtgacattagggtttttgttcgtcctcttaaagcttctcgttttctctgccgtctctc

SEQ ID NO: 37 - DNA, 1024 bp, Arabidopsis thaliana
  misc_feature (1)..(1024): Ceres Promoter YP0088
tcgattgggattactacttcatctagtaaggttctgaaaacgtttgttgttgataaggaagattcgtctcaggttattactgttgatcttcaaggtttgtgattgtgacgcttatacatgtgctgaaactgtggtgtttatttattgaaaacaaaaaaaaagtctctcttgtagtttcattgtactaaatagaaaacaagaaacgtttttttctttaatcttctacattgataatattggatcaaaggattgtttctgcaagacacaacacaaacatacttatactagtttacttctactaagtactaactacatacccatacacacacttgcacctagactttacttctagacatcattaccctaaggtagaaccaagcttacaagcaagttttaccgacaactcttacattacaactctagtctgtagtctttaacgtagacttactaactagtcattagtggtttaattttttaaattttcatccatatgtttttgttgtagatataaactaaagtcggtcacatttaataattgtcattatgtccgcgtaaaagtcaattcagctattggacatttatgaaatgtaagattttctctctcatttccccgtgcgtgaagacatgcattggtttttctgtaataatcaacaaatccaaaccccttttcgatctttatttggacattgttagagacaaaatttctctatagtctttttcctaatttgataccatgtttttgtttctgcacaaatttactcactggtttaactaactatccacttatttatgattttaccattaggcgtcagctagccctagtcaaatttgtaaacaagccaagctatctacataaatcgagatgtcattaacgttaatcgtcgttaattcgaatttgaaaacatagatagctttagcagtacaatgggcaatggtaagaagaatagcaaaaggcccaatatttggtttgcagaaattaaagccttaaaaaaaagcccacagatatttgtcaaagaaccctaat

SEQ ID NO: 38 - DNA, 1024 bp, Arabidopsis thaliana
  misc_feature (1)..(1024): Ceres Promoter YP0092
aaagattgagttgagagagatggtggagacgcagaacagacaaagggagtttaccatatagtgctctaaagggcaatgagattgcagtgatgtggctatccggggaatcatcgcaggttattccttcccatgagcaacaatcaatggatgggttccaattcagaggagaaacagaagaagaaacgtttccagagaaccacagtagggattctcgatcttgcgagttgcagagagcctctgaaactgcaatagaaaggacactgatgaaaagaacacactgaaggagtatgccaatcatgtgaaaactcagagcttgtattggtcttgtggttgatgaagttctcacaaaacctttggctttgaatctcccctcattagtcatggtgagaacaagaacaagacgagaaacagacaaagaagatgaaaaaacttgttggccagtgttgactaagggggaatagccccagacataacaaaattagacttgtcgtacatctttaatatttttttatctgtttctttgtcctgacgctttcattattcctgtgatcaattttctcataccattggtccatcgttaatcctttcttaatttcattttctacgtaacatgagaggagaccaagtcctatgagaacagttgacgtaacagtggttgttaagttaagttaaaaagaggaagctagtgagagtgaccgttaggtagagaagtgagatctttaaccactcttctttctctctctctctgcttttttcgtcgtctttcacatctactgttcgcaaactctcttatgcttccaataatggtgataccaattgagacttgcaggagaatctcctcttctccacactctatcaactggtcagccatggaatggtcgtttcagtttcaatattcctggattctttttaaggattcctgtttctcttctgttcctggtatattcttaacgacgaaattagtatcggatcctggtaatacattttgaagcttttaagtaccattgcactgggatccaacaat

SEQ ID NO: 39 - DNA, 1020 bp, Arabidopsis thaliana
  misc_feature (1)..(1020): Ceres Promoter YP0096
gaggtcagtgagtcgattggtgcaaaattgaaaaattgaagggtgaaacaaatttaaagataatatctattaaatcctctaattttaaaaatttagcaaaaattgtattttcttatggatctgttagttcacacgtatcttaattagtaccaaatcatatctaatgattagtgataaaactagttagatatctatatgtgtctttaccatttaacttgaatccttcttcttttttttacgtaaacaacttgaatccttcgttaatacataaatttaaagcattttttctttaattctattgatcggtatatatttactataagttttagctcatatgcaatttcaaatgatatgcttttaaattttgtctaggtgtgatagttgtatctttaacataaatcttatagcaaaattatacttgatattctaaatttatctatttgctcttgtgaacctcatattagtctagagaaactttgaaatcctttcaattagttgtatgtccaatacatttttactaacatttattagtctttttaattaagattattgttagaaaaaaaaagattttttaaaaataaataatatgttttagatacaatgtgagttaggcttcttatattttaaaaaataaatttatttcatacttaaaaatagtttggaatttcaatttatttggctgaataccataaaatatgtcaatttgaaccttatacccattgactatttggtgttagaaaccctttaacaaaaaaaaactatttggtgttagatatcaaaataaaaaaagtttaaccattggtttcttatattgaattggatattgttacatgtattaaagtttttttggtttaattttgaaacgttgatagaaactattaagtttaagtttggtagtatatttatttgtggaaaatttaattgccattaaatataacgtcaactttttttggttttttttgagaagttacgttgtgattttgatttcctatataaaagttagattacgtcattttttaa

SEQ ID NO: 40 - DNA, 1000 bp, Arabidopsis thaliana
  misc_feature (1)..(1000): Ceres Promoter YP0097
ttcatctttatatttaagagtttaaaaactgcaacttttgtttttctttcactaagtcttatggccacagttaattaaaagcagatgaaaggtggtccaatggaaaaggagaatgtgattgggctagttgggagagttctgatgtctagtgttgggtacacgtgtccgtcagttacacatagcattaaatcagacggcatgtcattattcaaatctagttcacatagtacgactaatagctgataaattaatgattatacagcatatgaattatgaattcaaaaaaaaaaaaaaattgaaaatgttaaggagatgctatattttacaaaattcatcgcaatgctttctactaatttgctaagtggtcttctccagttagtcttgtcgattccaagcgatattattaaatcttgaagcatcgctcaaagcattatagcttaagataaccaaattgttattaaaaacacctagtgaaatttttaaattaaaacaattttgatatctttgtaatatctaatactactctttctgtgtctaaaaggattaattttcaaaaatttcacacatattaaaaaaaaaaaaaaattactagctaaacaattttcaataatcataaaacaatagtaacttaataatttttttttattttcaaaatagtccttcaagtttacaattcattttagtattataatcaacaaaatttgtattaaaaagttggaaaattaatctttgtggaacaaaaaaatctagaaatcattttttagaattagagagaggtttgataaaaaaaaataaaaaaaaatagagagaggtagtacatactaaacgatgtgatactactattgacaaaatcttaattctcagtttagtagaataaactagaaggaatgaatgaagtaaatgcgaatccaactactaacaaaccctacttagtcatcatattttcccatatgaaatccctatataaacccatcatcatctcccacttttttcatatcca

SEQ ID NO: 41 - DNA, 1004 bp, Arabidopsis thaliana
  misc_feature (1)..(1004): Ceres Promoter YP0101
ttctcgttctctagaatattgctggaccggattaggtcaatattattgggccagattagatattgaattgtcgacgttgcttacgttacgttatatcttgtttaagaattaaacctatcgacttagtcttaattaagaaaacattgccttaaattctctggtctgcgaccgtttttttgaccgttaacccctaattaaagaaacaaaataattatagaaagagcactgaaatgtgattattttaacagtactcttatgagaaaattcgtactttttagttttttttttgtacaaatctctaagaaaaacactactactaattaagaaacgtttcaaacaattttattttcgttggctcataatctttctttctcggtccgggactaaccgttggcaaaaaaaaaaaaaaagttgacaataattattaaagcgtaaatcatacctctcaaataaaaacttgaatttggaaacaaagacaactaaaaaactcgaatttaagagaattcctaaaatcaagtgaagtatcatcacttggtaaaatttcataaccgttggcttctatttctatgtgtgccttggtttgcaggagataatatttcatttccaaccaatgatattcgtacacatagtcaaacaaatgtttgtctttgttattatattgagaaagaaacaagaaagagagagagagatagataagacgaaggaagtgaagcttccaagcgcccaccgttaaaaatctcgtgtgcaagtttcaaatacaagtggccggtggtctccataatttgatcgtcatccaattaaaaaggaagaaaaagcgtgttttatacaagaaaactcattaaaatagcaagtctagaaatatctcaacactaatctaccacgtctattacacacacacacacacacacttgatcttaatttattttcaagattcaagaaaatacccattccattaccacaacttgaccacacgcctatatataaaacataaaagccctttcccc

SEQ ID NO: 42 - DNA, 1000 bp, Arabidopsis thaliana
  misc_feature (1)..(1000): Ceres Promoter YP0102
atttggttgataacgttttcactcgactaattatatacttcagaaggatagtaatagaataccaaaataattaaatgattggttagtgccttagtggagactttttaaccgattctaatagactaatgatgtagctaagcatttatttgggatcatcactgtttgaaaacgtgaaatgtgataaaagttatgaaacgattaaaatataaaataaccgtacaaaacattatgtaccgtttttttctctgttcttttggcgatttggtttagttcgttacactctaaatgttattgcagatatatatataatgatgcatttgcatctgaggaacatataattccggttaacacttccaaatcttatatccgtctaggtagggattttataaatcatttgtgtcatcatgcgttatgcttgtcggctttgaccataacgcagagatatagaactagcttttacttaacttttagatttattatttgatctagagttaagtggagatatatagtgtttttgttagattattggtggatgtgagagtttgtctttagtttcaagttgagaatataaggcaagaggagactctgaggcaatcagaggttttgattggcaaaatatccaaaaggcccaaaccaagtcgaagcccatctcgtacaaaaaaagaaagagatctgtaagaaaaaatattctttgatattcttacaaaaataagtgtaaaacttttattagtcaaaatcttcaatctttaaaaactctcatcactcctacgaaagcgcgtgagagttatgagacattccttaatagcattactcacaagtcacaagttcaaaacgtctgactgaaacagaaacaagcctttgttgaagtcttgaagaagagacattagtactcgtcgtatagccataaaaggtaatatacgaaatttcttcgctaatctcttcaccttcctctacgcgtttcactttcactttataaatccaaatctcccttcgaaaacat

SEQ ID NO: 43 - DNA, 1004 bp, Arabidopsis thaliana
  misc_feature (1)..(1004): Ceres Promoter YP0103
gttttgaagaacaatctggatcgaaatctaacataaggtcatcgtattcaagttacgcagtcaaggacttgacatcatcctactctggtctgaggttaccacttccaaagatgggatttttcgactcggtatgcttcctaagaaattcgttttattgaacctagcaaatatcttgtaatgtaagattcctgagatgatgaagaaaaaacaaacttttgttacagcaggagaacggagagaaagaaaacagagaaccaaatgctcttgaagcaaacagaagaagaagacacaaatccaaacttgagacttcttctacaccagaaaaccgcagcattctgggacaacgcaaaacacgaaagtgaaacgggcaatgatatatatgtcttgggtgcgttacaaggcatcgtttgcaactgttgagttggataagtcaactgtcttcttttcctttggttgtagtagctgccttttttttcctttgttgctttaagaaatagcccgaaaaaaagaatgttctacatttcggagcagaaaactaaccgaatgagtttttggtcggatcatcggatcgatcagatatattttgagttacgaactgttataaaaaaagccataattttgtgttgagtttgcaaaataccttataacttgttatttgagattgcacctccatatatattaattcgtaagagtatttattaagtaagctttagtataaatccttttttcctttaaagtaagttaatgttctactaaataatagtaaagttgaagaaccgctccgtttttacaccatgcacgtgttatctaacaaagaaaatatggtacacctaatggctaatgcaaaggacaacacaatgaaactaacttgactctgtgttatagaaacccatagacatctgcatacatcctagtatttgtataaattggactcaaattcctgaggacaatcatagcaaacaatcacatcatcgcaatatacataaacaaaagaggaagaaaaa

SEQ ID NO: 44 - DNA, 1003 bp, Arabidopsis thaliana
  misc_feature (1)..(1003): Ceres Promoter YP0107
taacaatccttgggaacattgcatccatagatatccggttaagatcgatctttgaactcataaaaactagtagattggttggttggtttccatgtaccagaaggcttaccctattagttgaaagttgaaactttgttccctactcaattcctagttgtgtaaatgtatgtatatgtaatgtgtataaaacgtagtacttaaatgactaggagtggttcttgagaccgatgagagatgggagcagaactaaagatgatgacataattaagaacgaatttgaaaggctcttaggtttgaatcctattcgagaatgtttttgtcaaagatagtggcgattttgaaccaaagaaaacatttaaaaaatcagtatccggttacgttcatgcaaatagaaagtggtctaggatctgattgtaattttagacttaaagagtctcttaagattcaatcctggctgtgtacaaaactacaaataatctattttagactatttgggccttaactaaacttccactccattatttactgaggttagagaatagacttgcgaataaacacattccccgagaaatactcatgatcccataattagtcggagggtatgccaatcagatctaagaacacacattccctcaaattttaatgcacatgtaatcatagtttagcacaattcaaaaataatgtagtattaaagacagaaatttgtagacttttttttggcgttaaaagaagactaagtttatacgtacattttattttaagtggaaaaccgaaattttccatcgaaatatatgaatttagtatatatatttctgcaatgtactattttgctattttggcaactttcagtggactactactttattacaatgtgtatggatgcatgagtttgagtatacacatgtctaaatgcatgctttgtaaaacgtaacggaccacaaaagaggatccatacaaatacatctcatagcttcctccattattttccgacacaaacagagca

SEQ ID NO: 45 - DNA, 1024 bp, Arabidopsis thaliana
  misc_feature (1)..(1024): Ceres Promoter YP0110
gggatgcggttccgcttcctcttgatcttggacgagtcggaggacattgttggatcccagtgcaatggtaatataaaacaagaaaacaagagattttataggacaatcactaaatgacatttaattgattaaacatttattcattaataattgtatgttactaacttcaacatttaataattttgtttaagatacgtttacatcagagactattaatatttttacaggttgtaactttaaactttgtcttgaatcgaacatgactatagattttgggcaaacttaaagataacaacatttccgttttttttcaaattattacaaatcaaactgatatattagacacaacacgattacacgtaatgaaaaaagaaaaagataaaaagataaaagaagggatcgattctgtttggtctggtttagtgagattcaaagttaagctcttcctttcaagacatgccttcttaaaccgggaatgtgaacgtttgtaatgtagtccgtccagttaatgcttccaacatcaaatccaaattctctcttctcgtcctctgacatattctccattaatctctggggtattgctgttatcaaatctgtaaaagaaaccaaaaaaaaaagatgaaaactttgcgggtaccggttttgtctgctctaagaattagaatgttaatgagttctgtcttaccttccaccatagaaagtgtatggctcataaatagtagcaaggtgtttggcttgttcaacagatttcttgcatataaactttagcttctgcatcatcttactatccactgaactcataccactcatcaacccactccgttcttgagcatctctccacaaatgatccgagaaatcatcaacggaattgaaaagtttcatcaaacgcaccataataggatcacctttagagtccatgcatggagatgttttgtagtggttataaagaagctccgctaagtcttcgaaaaccagcgggtttatcgccgaagaagcgatctgatacacgtttatttcaggttcc

SEQ ID NO: 46 - DNA, 1024 bp, Arabidopsis thaliana
  misc_feature (1)..(1024): Ceres Promoter YP0111
cgattggatttagtctatacattatagggcgcaagtttgtggatttaagaattatataaaaacttgaaatatatagtttttatgcattctcctcttgtgtaatacataaaccaaatatgagataggttaatctgtatttcagataatattaaattccaaacaatatttttacttgttataagaaggcaattaatatctctctgttaatggcaagtggtaccaagtagtattaaactattaatgcaatggaagagtactgttggaaattataatcctctatcacacattcaaacagatctcctgaaatcttctcttccaaacttgtacttctctgatccaaatgtaggctccaaaatatagacatttaccatttactaagtccacaactcctttcttgtctccttcaaaaatgactcttgtgtaaccaccatatgactccgacagttcggcattgccatgatgagagcttaaaaattcaccttcctgagcatttcaagtcttcactcccttagcttgacctgaaccaagataaaatgcctttgtcgtcccgtaatatccatcctgctttggacggcatcatagttacattcgatccatcctatttacaatgttattttagtattaaaaacatgacaataaatttgttgttaaacatattcaaatacaatatgattggatttataagtaattgtaatatgaaatgtccttagtaatatgttaaaaaatacatagatacacacacgtactaaaagaggcaacgcgggagatgtcattagaggaagaactaggaagcagagcgttcatgcaaaatgctaccaaaaacgttaatgcaatatctcaactaatcagcacagtccatttcatactgagaatgtaaaaaccaatcagcatcgtccattttttcatctaattatttgttaactcttaattggccacaacttccaaccacatgacgctctttctattccctttatatattcccatctcaaatgttcttggagacacaaaatatcataaacatata

SEQ ID NO: 47 - DNA, 996 bp, Arabidopsis thaliana
  misc_feature (1)..(996): Ceres Promoter YP0115
gtcgattggatgatgaacattctacatatataattattatgtttaagcacttagacagcataaattctttctaattatataaatctaaccttgttacattgtacatctataaattacttgaagaaataacgagttctatttctttttaaaaattaaaaatactataccatatctcagtgattaagttgaaccaaaaggtacggaggagaaacaagcatttgattcttccttattttattttattcatctctcactaatgatggtggagaaaaaaagaaaatacctaacaaacaaatatatattgtcatacaaaaatatttctatatttttagttaattagtttatattcctcacttttcagggcttatataagaaagtgagcaaacacaaatcaaaatgcagcagcaaatactatcatcacccatctccttagttctattttataattcctcttctttttgttcatagctttgtaattatagtcttatttctctttaaggctcaataagaggaggtactattactacacttctctctacttttacttgtattttagcattaaaatcctaaaatccgttttaaattcaaaaataaacttagagatgtttaatctcgattcggtttttcggctttaggagaataattatatgaaattagtatggatatctttactagtttccattcaaatgattctgatttcaatctaatactctcactctttaattaaactatatgtagtgtaatttcacactgttaaatttctaccatgtcatgtatattagagttgcatagaaaattgtaaaacatccatttgaattcgaatgaaacaaaatgttttaaaataaaattttggtttttaaaagaaaaatctaaaactgaattatatcgtttaaccaagttgtaaaagtcataaaacgtagtatcttgtaaatcgctcttccacggtccaaatagacttctagtaataaacaagtaaaactaattttggtttcttac

SEQ ID NO: 48 - DNA, 1024 bp, Arabidopsis thaliana
  misc_feature (1)..(1024): Ceres Promoter YP0117
gtcagtgagtcgattggatcacagtcctttatgataaaacaaactcataattattccaccgacaacatgcgttttaaattattttttcttaaattatattatattatattgatatcaacctagctaaaataattcggatggcgaaatcggacaatttttaatagaaaaaatgggtatgaagatagtctatgattccgttcttagcgactagagggacctgctcaaatctcccgggtgatacgcgatgtcaagctcaatagaaccccacaaccgacgagaccgagaaatccttgatttgggctagaagattttgaaataaatttaatatattctaagtaacttgcttaaattttttttcaaactctaaagacataactaacataaagtaaaaaaaaaaaagttaatacatgggaagaaaaaaattaaactaatgattagctctctaacgtgtttaatctcgtatcaagtttttttttaaaaattatattgctattaaaacattgtactattgtttctattttgtttagctattattcttgtgaaatgaaaagttgtgtttattcaattactaaatggcaatatttatcttggaaaactatacctctaattggattaggccctagacatcctctttagcttattgacgttaaaattattcccaaaactattaaagtttagtagtttgaaagatgcatcaagacctactcagataggtaaaagtagaaaactacagttagtgtgattatattttaaaatatataaaacaatcttattaaactaaatattcaagatatatactcaaatggaagataaaaacatttagtctgttaccactaccagcctagctagtcactaatagtcactttggaactgagtagatatttgcatcttgagttaccatggactcaaaagtccaaaaagagaccccgagtgaaaatgctaccaacttaataacaaagaagcatttacagcggtcaaaaagtatctataaatgtttacacaacagtagtcataagcaccattg

SEQ ID NO: 49 - DNA, 1000 bp, Arabidopsis thaliana
  misc_feature (1)..(1000): Ceres Promoter YP0119
taccaaaaataaggagtttccaaaagatggttctgatgagaaacagagcccatccctctccttttccccttcccatgaaagaaatcggatggtcctccttcaatgtcctccacctactcttctcttctttctttttttctttcttattattaaccatttaattaatttccccttcaatttcagtttctagttctgtaaaaagaaaatacacatctcacttatagatatccatatctatttatatgcatgtatagagaataaaaaagtgtgagtttctaggtatgttgagtatgtgctgtttggacaattgttagatgatctgtccatttttttcttttttcttctgtgtataaatatatttgagcacaaagaaaaactaataaccttctgttttcagcaagtagggtcttataaccttcaaagaaatattccttcaattgaaaacccataaaccaaaatagatattacaaaaggaaagagagatattttcaagaacaacataattagaaaagcagaagcagcagttaagtggtactgagataaatgatatagtttctcttcaagaacagtttctcattacccaccttctcctttttgctgatctatcgtaatcttgagaactcaggtaaggttgtgaatattatgcaccattcattaaccctaaaaataagagatttaaaataaatgtttcttctttctctgattcttgtgtaaccaattcatgggtttgatatgtttcttggttattgcttatcaacaaagagatttgatcattataaagtagattaataactcttaaacacacaaagtttctttattttttagttacatccctaattctagaccagaacatggatttgatctatttcttggttatgtattcttgatcaggaaaagggatttgatcatcaagattagccttctctctctctctctagatatctttcttgaatttagaaatctttatttaattatttggtgatgtcatatataggatcaa

SEQ ID NO: 50 - DNA, 999 bp, Arabidopsis thaliana
  misc_feature (1)..(999): Ceres Promoter YP0120
tagtttttgatttaatctacgtttttcttaatcataaatgggtaattattagtttttgcaaaatcaaaatccaaaaattgttctaaacactgcaaccatttaaggcctatatcactcagaaaatttctggtgggagaactaatcgtttgtcctttctaaatctcacatattagaatttagaattagtgtgctacataagaatattagttcagctcggaacaactattttttggtaaaacagagaacttaaacaaatgcattattttatcaacatgcattttgaattgaatataaaatttcataattgtaaagacataaattacataaaattttacatgaaaaaatagatatagaaagaaaatgaaactaactgatgatatgctctctaaattttttaatctcataacaagaattcaaattaattagttcatatttttggttaatataacatttacctgtctaagttggaactttcatttttttctgttttgtttagtcagtattcttaatgtgaaacggaaagttgaatttattcaaacttaaattcaatagcattaattaaaggcgaaagctattatctctacatgtggttcaaactagacatccaatttaattagcttattgacgttgaaatgttttccaaaactactatagtttggcaatttgaaagatgcatcagaactactcagacaggtaaaagtagaacctctagctgtgtgaattgtatgttagtccataaagaacatcttgtaaacttcatacttaagatatatattacaatatatacttgaatggtagataaaaacgattagtctgattgctagcatactcacaactatttggaaatgagtaagatattggcattctagagttactactatggagacaaaagtcgaataaaagagacctcacgtgaaaatgttacgagctagtaaaaaaagcatttacactaacggtaaaaaaagtatctataaatgtttacacaaggtagtagtcatt

SEQ ID NO: 51 - DNA, 999 bp, Arabidopsis thaliana
  misc_feature (1)..(999): Ceres Promoter YP0121
ttggattttttttttgttgagtcagcagaccatctaatctctctttttccaccacagcctgctttctatgaagcatttgggcttacggttgtggaatcaatgacttgtgcactcccaacgtttgctacctgtcatggtggacccgcagagattatcgaaaacggagtttctgggttccacattgacccatatcatccagaccaggttgcagctaccttggtcagcttctttgagacctgtaacaccaatccaaatcattgggttaaaatctctgaaggagggctcaagcgaatctatgaaaggttggcccattctccttgacaggcttaacaatacaacttgtatcgcttcaacaagatgatggcttaataaggatttttgcatgtataggtacacatggaagaagtactcagagagactgcttaccctggctggagtctatgcattctggaaacatgtgtctaagctcgaaaggagagaaacacgacgttacctagagatgttttactcattgaaatttcgtgatttggttagtgtaacccactgttattcttttgatgtctacatctactttacttacattattcttttcttcggtttgcaggccaattcaatcccgctggcaacagatgagaactgatcatgacagggtaggattttatttcctgcactttctttagatcttttgtttgtgttatcttgaataaaaattgttgggttttgtttccttcagtggtttgattttggacttatttgtgttaatgttgttttggctgttctcttaatatcaataacaaataaatttactggttggtatctaagatctaacaatagttactatttttagaggtaaagacaccaaccttgttatattggtcagagagctaaaaccttgacttgttgggaaaacaaaactctaatgacagaaaatctgacatgatgccttataattcacagcctcatgttctacataaatcctaacaatagcactttgtttct

SEQ ID NO: 52 - DNA, 1004 bp, Arabidopsis thaliana
  misc_feature (1)..(1004): Ceres Promoter YP0128
gataaactgataatggaaaagaacaaagaaaccagtttttaactatttgcatatgtaatttatttgttgcaaattatatttagttaaaatgtttcctctatttatatatatatatatcagtcaagcactatgtataagaaatgtcaatttataaatttttacatgtcctttaacagaaagaaaatgaatttttacatgtcattcatagagagtcactcgtttatttcttatatagagaataacacactcacatgcatatgcatgcaatatgatacattttatgacaaagataatcaacggaaacggtcaagacataatttgataaacaacttgcacgatgcacagatctgatcaaatatataactctttaacatatccaaaatattcaaaaagaaaaactcgatccaaactagcaacatcacgctcacgcggtaggctaaaaatttattaatctccaaaagtctttcttatgaacactgcaaacacaacaacttgaaaagtcatataggtttagatgatgacgcgtattggctatcgcttaccggagtggctcataaatacaataaacaatacgtaaaagtcaaagtcaaatatatttagtcaactataaccattaatcgggcaaaacctttagctgtcaaaacaacgtgaaaacgatatttgtatatatcatcaagaatcagtagataagagaatgatttaatcccctgactattacaattttggtgtaataaacagtctctattggtttttattctttgttttaatttctcatgacctatagagagaattaggtagtttcgaaaattggctaatcaacttttgaaaactactgtctactttgcttaaattctctacacttagtttcggataagataattgtcggactaatagttaatcccttgacaatctttgatattataaaaggtttagttaatctcttctctatataaatattcatacaccagctttcaaaaatatataatccaaacaccaaaaacaaa

SEQ ID NO: 53 - DNA, 1001 bp, Arabidopsis thaliana
  misc_feature (1)..(1001): Ceres Promoter YP0137
gtggcacatgctgaaaccccgagcatctctccggaagacacgcgtcgttcgctccaaagaaaacagtcacagctgccggagaatctccgccgtcttcttctgccaccggaaaaactctctccaccactttcagtgcccacctcgtgttatatccactgtatcctcgtagcaccatatcagcctaataaaattttatgtatcaaattttaagacatagccgaaactacactatactagacaataataatatgatttgtttcctgaaaaattatggtttcatgagaaacattaatcatctataaaacaaattagctatggcatcgaagagttatcaatcaaaactgatgaatctttacttaatatatacaacatatctttaccttgcggcggagaagatcggcgagagaagcaccccagccaccgtcactaaaggattcttcagtgatggaatcaccaaagagaaaaaccttccgtctcatcatcttccacacaatcttcttgagaaaatctgagagataagaaaggtgtagtggttttgctgaagtgatcgtgtttgatttagtaaagaaatgctttatttattgttgggggaaacataaataaataaagtaaaagtggatgcactaaatgctttcacccactaatcaccgacctttcatggtttattgtgaaatacactcatagatagacatacaataccttatgtacgtaaataacattttatttgtcgacacttatgtaagtaacgcatagattattttctatgtgattgccactctcagactctcagtttcaaccaataataacaataactacaacaacattaatcataaacatatgctctggtttacaattaaagcttagattaagaaactgtaacaacgttacagaaaaaaaatgttatttacgttttgtaagattagtctctagaatcatcaccgttttttatatattaatgattctttcttatatataaaacctttctcgaaatacccatgaaa

SEQ ID NO: 54 - DNA, 1001 bp, Arabidopsis thaliana
  misc_feature (1)..(1001): Ceres Promoter YP0143
atacaacagatggcagatatcgagttaaatacgtgaatcagccgttacgatattttaaaactagaaaattatttaaaaatattgcaaaataccatttaatttcattgttcataaaaaaaagaaattcaaaaacttaaaaactgattcaaaaatttggattaattctcattaacagtcttcaacactacaacaacatgtttctaatttattttatattttaataattaaacaatatatacgtctgcacattgttgctccgacataatctagtataaaaatagttgcagcatatgtgaaaagcaagcagcatttatcactcaatacttttaattttatctgttgtatgtattaaggttttgtagctttaagaaaacgcttataatataaaataacttctaaaagatatttcatgcgtatacaataaatatttgtgaaaaaacatttcgaaaacgtgtacaatatataaactattgtgttatcttttgacattcaaacaaatgttgacaatgtaattttatccatgatatgattggccaattagctgcgaggtaaaaatccgtatacgagtaaaagtaagataaaatttcgcaagaagatttttagcaggaaatctaagacaagtgtcatgaacgtgtcaatcaacaaacgaaaaggagaattatagaatccagattcgacgtaccacattaataaatatcaaaacattttatgttattttatttttgctctggcagttacactctttttcattgctccaataaaaaaatcactcgcatgcatgcatatatatacaccatagtaaactccgcctcttcttcattttaaaagtatcagtttacactgacacaatccttaactattttcctttgttcttcttcatctttattacacatttttttcaaggtaacaaataatctttttaagtcacttttatactctttaaatcttagattgatatatgaatgcatgttaatatttcaagatttataggtctaccaaac

SEQ ID NO: 55 - DNA, 1003 bp, Arabidopsis thaliana
  misc_feature (1)..(1003): Ceres Promoter YP0144
aaacgttgcaagattattgattgtgagaaagagtgctcaaggtagtactgatttctgtaaagctcacggtggtgggaaacgatgttcttggggagatgggaaatgtgagaaaatttgctagaggaaagaagcggtttatgcgctgcgcataacactattatgtctcgggagaacaaagatggaagcaagagcggtttgattggaccgggactctttagtggccttgtttttggctctacttctgatcattctcagtctggagctagcgctgtctctgattgtactgattctgttgaacgaatacagtttgagaataggcagaagaacaagaagatgatgataccgatgcaggttctagtaccttcatcaatgaaatctccaagtaattcacatgaaggagaaacaaacatctatgacttcatggttccggaggagagagttcacggcggtgggctagtaatgtctttacttggtggctccattgatcgaaactgaaagccatttatggtaaaagtgtcacattctcagcaaaaacctgtgtaaagctgtaaaatgtgtgggaatctccgaatctgtttgtagccggttacgttatgctggatcaaaaactcaagatttgttggatattgttatgctggatcggtggtgaaaccacttcccggttgctaaataaataaacgtttttgttttataatctttttcactaaacggcagtatgggcctttagtgggcttcctttaagcgaccaatacaatcgtcgcaccggaatctactaccatttataggtttattcatgtaaaacctcggaaaatttgagagccacaacggtcaagagacaaaaacaacttgaagataaagggataaggaaggcttcctacatgatggacaacatttctttccacacaaattctcataataaaaatcttataatacaaatacttacgtcataatcattcaatctagtccccatgttttaaggtcctgtttcttgtctgatacaaat

SEQ ID NO: 56 - DNA, 1004 bp, Arabidopsis thaliana
  misc_feature (1)..(1004): Ceres Promoter YP0156
ttggtttgcattgtgaagatttgtattaactatagaacattgaattgatggtgttaagttcttacacaagcgtgcttctcggtttgaactgtttcttttgtatgttgaatcagagcttagtttataggaaccagagtatctacttagtcattctctgatgctaagtgctaaggttctacctagttgccctctaggcccttatgttattgataacttatgaagctatttgaacacttgattcttaggagacctaagttggtacagccagatagagtgtatgttcttgttctctatgtgacaggatcaagctgccacacatagttcaagggtatgctctgtgtgggtttgctcagattgaggacaaatctatacaaggaagtagagtctttgacattttgatgttgtatgataagaagaagaaaggagagtaataaagaaagagaaaagggaaacagaaacacgtgggagaacatcccaaagaggaagcacacgcggatcttcatgcaaagctccccgattctcccatgtggtccctttctccctttgtccccctcctctttcttcttttctcattttactcctttttttaccattatacaacgaatcttttttatcataattttttggttttggtttattttccaataacactttcttggttacttcccattctcactttttcatataagaaactcactttgggaaacttatgtttgagaatgacaagtctttttagagaaagtgatgtaacaaatctaaagtgattatataataaccttgcacaatgtttttgattttttgtaagattcgaatattaggtttattattcgtagggaataaacttactttcaaaagcgttcataagttaatactttcatatatgatcataagtacggacactattgttttttgtttgtttgtgtttattctaaaagaaagtagcttttaattgaaatgtcctcggaggcacagtttaaagttcgagtgtaacagtttctaaggca

SEQ ID NO: 57 - DNA, 1000 bp, Arabidopsis thaliana
  misc_feature (1)..(1000): Ceres Promoter YP0158
ttattagattaatagattgcattgcattgcttgtgctttcaatttacaaattgtctcccaactccatcgacacatctctttttgtgtatataagattcagacttgttatattttttttataaatatgttattagcatcttaagttaaattgattttttatatctgcattaaggattacacgactatatttgcgattgtgtgttggttaaaatataatttaggattgtctttaactacatttaggattatatgactatatttggttaaatataaaatctagctgtgattattagtattcaaaaataagtagcctaaccaattaaaacaacggctattggggcaaattagaacattttagtgtgtccaaaatataatggtcattaggtcatattcctcctagcttcatcgcagcataattgaatgattgccttatttagaagagcttttccactttcccaaaatctaggtgggatctttttgttttgaccttcatttttcttgtttaccatttttagctaaattatttacgattacaaaagatatcaaaagttggatcataatacaatttatagacttactgtagaaaattcgtatgtacaagtacaacaaattcttcataataaattttgaaaattctattacaaatgttgtaagaaatagaatttgaaatatatataaactaaggagaaaaaaaaagagaacatgcattgctctagtcagagtggaccaacatcaacgagataagataacataaaaaccaactcaccataactaaaaacatcccaagagatccaacgattcatatcaaacacaaaaacatcgaacgatcagatttaaaccatctctggtatctccaaaacacaaacacttttttttttcttttgtctgaatggaacaaaagcatgcgacatctctgtgtctttatcttctctctcctcttcttgaaaaactgaacctttaattctttcttcacatctcctttagctttctgaagctgcta

SEQ ID NO: 58 - DNA, 1005 bp, Arabidopsis thaliana
  misc_feature (1)..(1005): Ceres Promoter YP0188
gattggtatgaaatttcggagaccaacaaaaaaaactttattgagcttggagtgaagctatatatatggggcaagatcataatatgtttatatcggccttttcgttaactgaaaataatagttttgagaaatatatcaaatggtaaacagacatcatctttgaaaaataccatcaatgaagttaatattgttattggcatatggtttacccatcttaattttaatgcaaccaaacaaacaagaaacaaaaactgtataagatacaaggtgttttacgattttccgtcttaaaaccgaaatatttttgttcctacgactttaaacggactttgcttaagttgtgtgcatgtaagctcgtcgtccctcgattgtcatcaacattcaccaatatcagcctctatcacacgagtgaaggtggtgattcggcttaatgaaaacagagaaatatttcaatatgattcctattaaattttaaatcttttttctcaatctctagattttcattaaaagcatcatgatttttttccactatgttcatatatctctatcacagttttaggtacattgtagaaattggataagatacgtcatacgtctaacatgaatttggtctagcaaggaaggtttgagataataagtgaaaagaaaacacaagataataaattataatttataaatgctttatagtattgaaaaataagatgattttttttttttttaataccggattggctgatccacttatgatgactcaaatgttattaagtttcaagacaatttatgatgacacaaatcacaatgagtcaatagtagccacgaagccagaaaaaaaaaatgtactacaaaaagataatgatagtacaaaatgatacgtcgtactgccacatgtacgacacaactcgattaccaaaaagcagagccatccaaccataaaactcaaaacacacagattccactggcgtgtgctctcctcacttcactcgtccttgaaacttgaggtactga

SEQ ID NO: 59 - DNA, 1002 bp, Arabidopsis thaliana
  misc_feature (1)..(1002): Ceres Promoter YP0190
taaatagtgacattggtaagaagaaaaaaaacactattaaatagtgaaaaaatggtttataactctcttaattaacattacttattattgctagcacctaaaatctcccacaaaatatttgttgtaaaacacaaatttacaaaatgattttgtttttaaattagtaacacatgttcatatatacgttaataagaacataccctatatgattttatataaaaaaatttctttgagacgtcttattcttttttctttaataatatgcaattgtgagagtttggatttgaatggtagcattagaagcaaacttgaaccaaacatatttcatgaagtcaaacttgaaccaatgtgatcactaatcacagtgttcgcagtgtaaggcatcagaaaatagaagaagggacatagctatgaatcatataatcttgacacatgttttataggttttaggtgtgtatgctaacaaaaaatgagacagctttcttctaatagacttaatatttgggctaaatgtaccacagttgtgaatttcttacaaaaatgggccgagctacaaaaaactacaggcccactctcaactcttatcaaacgacagcgttttacttttttaaaagcacacactttttgtttggtgtcggtgacggtgagtttcgtccgctcttcctttaaattgaagcaacggttttgatccgatcaaatccaacggtgctgattacacaaagcccgagacgaaaacgttgactattaagttaggttttaatctcagccgttaatctacaaatcaacggttccctgtaaaacgaatcttccttccttcttcacttccgcgtcttctctctcaatcacctcaaaaaaatcgatttcatcaaaatattcacccgcccgaatttgactctccgatcatcgtctccgaatctagatcgacgagatcaaaaccctagaaatctaaatcggaatgagaaattgattttgatacgaattagggatctgtgtgttgaggac

SEQ ID NO: 60 - DNA, 995 bp, Arabidopsis thaliana
  misc_feature (1)..(995): Ceres Promoter YP0212
agtcgattggtacactcttaatttaattagagtaagagatcaacaaaaatatagaattttctttatatcgaagtgctacgaccttatatatatagaaaaaaaagcataggtgaatctctaaattgagattgtgctgtagtaaacatattaagtttttagtttttttaagaaatgaatctttttgttgattaattcaaactagtagtcattaagattccggagattccaatttagaaaagtcaaagattcaaagaacaagtccaggtccacatgttgaatccgattcatcatccactcatccttcatatcttcctccaccgtctccgcccaaaaaatcaataacaataaaaaatcctaaaaaaacatatttgattttgaaaaaactttatcatatattatattaattaaatagttatccgatgactcatcctatggtcagggccttgctgtctctgacgtccttaattatcattatttttaaatttgtctctctcagaaaattacgccacaatcttcctctttcccttttccgaaaacagctaatatttgtggacctaaactaaataacgtagcctctagattttatataattactaatactatatgctactacttgttattatttactccaatcatatatgataccaatcaagaatcactacataagtagaaaactttgcaatgagtccattaattaaaattaagaataaacttaaaattttatggtattttaagattccctttggattgtaatgacaagaaatcagcaaattagtcgtaactcgtaagaataaacaagatcaatttttactttctttacaaagattccgttgtaattttagaaatttttttttgtcactgtttttttatagattaatttatctgcatcaatccgattaagaagtgtacacatgggcatctatatatatctaacaggtaaaacgtgtatgtacatgcataaggttttacgtgcttctataaatatatgtggcagt

SEQ ID NO: 61 - DNA, 1024 bp, Arabidopsis thaliana
  misc_feature (1)..(1024): Ceres Promoter YP0214
ccagtcgattggcgcctcgcatgcctatcatatttaaccgtcaataatggatttggcggttttggtaggccgggtcaaccggattaaaagaaaacggtttggagtccttccttgcaattgaattttcacacattcgggttttgtgatttctctgtcataatgggcccggcacatatggttcataacccatgtgggcctatggtataatttttccaattaaaactattgttaggtcgataaaacaaaaaacaataaaaacgagtggaatacacataccaaaaagaatgtgatgaacattagtaattttattttgatggttaatgaaaaacaaaataaatgcatcttggcatcttccgttggaaagcgcaaatagggcagattttcagacagatatcactatgatggggggtgagagaaagaaaacgaggcgtacctaatgtaacactacttaattagtcgttagttataggactttttttttgtttgggcctagttataggatcataaggtaaaaatgaagaatgaatattagattagtaggagctaatgatggagttaagtatgcacgtgtaagaactgggaagtgaaacctcctgtatggtgaagaaactatacaacaaagccctttgttggtgtatacgtattaatttttattcttttatcacaagcgatacgtatcttaagacataataaatatatatcttactcataataaatatcttaagatatatatacagtatacacctgtatatatataataaataggcatatagtagaaattaatatgagttgttgttgttgcaaatatataaatcaatcaaaagatttaaaacccaccattcaatcttggtaagtaacgaaaaaaaagggaagcaagaagaaccacagaaaagggggctaacaactagacacgtagatcttcatctgcccgtccatctaacctaccacactctcatcttctttttcccgtgtcagtttgttatataagctctcactctccggtatatttccccattgcactgga

SEQ ID NO: 62 - DNA, 911 bp, Arabidopsis thaliana
  misc_feature (1)..(911): Ceres Promoter YP0263
atctagctgtggattccaccaaaattctggcagggccatgatctaaaaactgagactgcgcgtgttgttttgcagtgatttgtatttcatatttgcaccatcctacacagtccacttggtatcgtaaccaaacataaggagaacctaattacattattgttttaatttcgtcaaactggtttttaccttttagttacatagttgattcttcatttgttttagtagttatggagcacaataatgtgcaacaaagaaagatcatagtggattaatatgttgagaggtcagaaattcttggttaacaaaaaaaagttacaaggactgagattttgggtgggagaaagccatagcttttaaaacatgattgaacttaaaagtgatgttatggtttgaggggaaaaaggttgatgtcaactaagatagttgaagtaatgtcttaaactaaagtaaaccaccggtccaaccgtggtccggaagcatctctggtatgatttatcctaaaaatcaaaatagtagaaacatactttaaatatatacattgatcggacgaaaattgtaaactagtatagtttcaaaaactagttgaacaggttatgtaccttaaacatttatttcaaacttaaacactaaagaacatatatgaatagaagtttatataaattactatatatctaccataaatctcttataattatgatgtcacgatgaggaagtgttgaaacgttaaaatgccaaaatataagcatgcgacggaattttggcagaagattgtagagttgtaatctgtcgcaatcattactcgtgctagcatttttcattttcccttcatttgtggataacgcacgatataacattctacacaccaacaagattctataaaaacgcaaaggttgtctccatagaatatcgtc

SEQ ID NO: 63 - DNA, 999 bp, Arabidopsis thaliana
  misc_feature (1)..(999): Ceres Promoter YP0275
aaacattaatatgtagtaactatgggcgtatgctttactttttaaaatgggcctatgctataattgaatgacaaggattaaacaactaataaaattgtagatgggttaagatgacttatttttttacttaccaatttataaatgggcttcgatgtactgaaatatatcgcgcctattaacgaggccattcaacgaatgttttaagggccctatttcgacattttaaagaacacctaggtcatcattccagaaatggatattataggatttagataatttcccacgtttggtttatttatctattttttgacgttgaccaacataatcgtgcccaaccgtttcacgcaacgaatttatatacgaaatatatatatttttcaaattaagataccacaatcaaaacagctgttgattaacaaagagattttttttttttggttttgagttacaataacgttagaggataaggtttcttgcaacgattaggaaatcgtataaaataaaatatgttataattaagtgttttattttataatgagtattaatataaataaaacctgcaaaaggatagggatattgaataataaagagaaacgaaagagcaattttacttctttataattgaaattatgtgaatgttatgtttacaatgaatgattcatcgttctatatattgaagtaaagaatgagtttattgtgcttgcataatgacgttaacttcacatatacacttattacataacatttatcacatgtgcgtctttttttttttttactttgtaaaatttcctcacttttaagacttttataacaattactagtaaaataaagttgcttggggctacaccctttctccctccaacaactctatttatagataacattatatcaaaatcaaaacatagtccctttcttctataaaggttttttcacaaccaaatttccattataaatcaaaaaataaaaacttaattagtttttacagaagaaaagaaaaca

SEQ ID NO: 64 - DNA, 981 bp, Arabidopsis thaliana
  misc_feature (1)..(981): Ceres Promoter YP0285
gggattatatatgatagacgattgtatttgcgggacattgagatgtttccgaaaatagtcatcaaatatcaaaccagaatttgatgtgaaaacactaattaaaacatataattgacaactagactatatcatttgttaagttgagcgttgaaagaaaatgaaagagtgtagactgtagtacgtatgagtttcccaaaagatggtgcttgaatattattgggaagagactttggttggttcggttgaatgaagatttttacctgccatgttgatagagaaaggcaaataaatgtaggggtcgatgtctaacgtaaagactggatcaaccaagagtcctcctcctcgtcttcaccaaaaaaaaagagtcctcctcgtggaaacttatttcttctccagccaagatctcatctcatctcttcactctatgaaatataaaggaatcttatggtttttctaaaaactatagtacgtctatataccaaaggaaacaatataaaatcagttaatctgataaattttgagtaaataataaagttaactttgtacttacctatatcaaactaattcacaaaataaagtaataataacaaagaatttttagtagatccacaatatacacacacactatgagaaatcataatagagaattttaatgattttgtctaactcatagcaacaagtcgctttggccgagtggttaaggcgtgtgcctgctaagtacatgggctctgcccgcgagagttcgaatctctcaggcgacgtttcttttgttttcggccataaaggaaaaagcccaattaacacgtctcgcttataagcccataaagcaaacaatgggctgtctctgtctcactcacacacgcgttttcctactttttgactatttttataaccggcgggtctgacttaattagggttttctttaataatcagacactctctcactcgtttcgtcaacattgaacacagacaaaaccgcgt

SEQ ID NO: 65 - DNA, 996 bp, Arabidopsis thaliana
  misc_feature (1)..(996): Ceres Promoter YP0286
gaaaacaatcataggttacgctattatcatcgaaaggtatgtgatgcatattcccattgaaccagatttccatatattttatttgtaaagtgataatgaatcacaagatgattcaatattaaaaatgggtaactcactttgacgtgtagtacgtggaagaatagttagctatcacgcatacatatatctatgaataagtgtgtatgacataagaaactaaaatatttacctaaagtccagttactcatactgatttcatgcatatatgtattatttatttatttttaataaagaagcgattggtgttttcatagaaatcatgatagattgataggtatttcagttccacaaatctagatctgtgtgctatacatgcatgtattaattttttccccttaaatcatttcagttgataatattgctctttgttccaactttagaaaaggtatgaaccaacctgacgattaacaagtaaacattaattaatctttatatgagataaaaccgaggatatatatgattgtgttgctgtctattgatgatgtgtcgatattatgcttgttgtaccaatgctcgagccgagcgtgatcgatgccttgacaaactatatatgtttcccgaattaattaagttttgtatcttaattagaataacatttttatacaatgtaatttctcaagcagacaagatatgtatcctatattaattactatatatgaattgccgggcacctaccaggatgtttcaaatacgagagcccattagtttccacgtaaatcacaatgacgcgacaaaatctagaatcgtgtcaaaactctatcaatacaataatatatatttcaagggcaatttcgacttctcctcaactcaatgattcaacgccatgaatctctatataaaggctacaacaccacaaaggatcatcagtcatcacaaccacattaactcttcaccactatctctcaatctctcgtttcatttcttgacgcgtgaaaa

SEQ ID NO: 66 - DNA, 1000 bp, Arabidopsis thaliana
  misc_feature (1)..(1000): Ceres Promoter YP0337
taatttttttatttttggaactaacacttattagtttaggtttccatcacctatttaattcgtaattcttatacatgcatataatagagatacatatatacaaatttatgatcatttttgcacaacatgtgatctcattcattagtatgcattatgcgaaaacctcgacgcgcaaaagacacgtaatagctaataatgttactcatttataatgattgaagcaagacgaaaacaacaacatatatatcaaattgtaaactagatatttcttaaaagtgaaaaaaaacaaagaaatataaaggacaattttgagtcagtctcttaatattaaaacatatatacataaataagcacaaacgtggttacctgtcttcatgcaatgtggactttagtttatctaatcaaaatcaaaataaaaggtgtaatagttctcgtcatttttcaaattttaaaaatcagaaccaagtgatttttgtttgagtattgatccattgtttaaacaatttaacacagtatatacgtctcttgagatgttgacatgatgataaaatacgagatcgtctcttggttttcgaattttgaactttaatagttttcttttttagggaaactttaatagttgtttatcataagattagtcacctaatggttacgttgcagtaccgaaccaattttttacccttttttctaaatgtggtcgtggcataatttccaaaagagatccaaaacccggtttgctcaactgataagccggtcggttctggtttgaaaaacaagaaataatctgaaagtgtgaaacagcaacgtgtctcggtgtttcatgagccacctgccacctcattcacgtcggtcattttgtcgtttcacggttcacgctctagacacgtgctctgtccccaccatgactttcgctgccgactcgcttcgctttgcaaactcaaacatgtgtgtatatgtaagtttcatcctaataagcatctcttaccacattaattaaaaa

SEQ ID NO: 67 - DNA, 1000 bp, Arabidopsis thaliana
  misc_feature (1)..(1000): Ceres Promoter YP0356
ttagttcattgaaacgtcaactttttacttgcaaccactttgtaggaccattaactgcaaaataagaattctctaagcttcacaaggggttcgtttggtgctataaaaacattgttttaagaactggtttactggttctataaatctataaatccaaatatgaagtatggcaataataataacatgttagcacaaaaaatactcattaaattcctacccaaaaaaaatctttatatgaaactaaaacttatatacacaataatagtgatacaaagtaggtcttgatattcaactattcgggattttctggtttcgagtaattcgtataaaaggtttaagatctattatgttcactgaaatcttaactttgttttgtttccagttttaactagtagaaattgaaatttttaaaaattgttacttacaataaaatttgaatcaatatccttaatcaaaggatcttaagactagcacaattaaaacatataacgtagaatatctgaaataactcgaaaatatctgaactaagttagtagttttaaaatataatcccggtttggaccgggcagtatgtacttcaatacttgtgggttttgacgattttggatcggattgggcgggccagccagattgatctattacaaatttcacctgtcaacgctaactccgaacttaatcaaagattttgagctaaggaaaactaatcagtgatcacccaaagaaaacattcgtgaataattgtttgctttccatggcagcaaaacaaataggacccaaataggaatgtcaaaaaaaagaaagacacgaaacgaagtagtataacgtaacacacaaaaataaactagagatattaaaaacacatgtccacacatggatacaagagcatttaaggagcagaaggcacgtagtggttagaaggtatgtgatataattaatcggcccaaatagattggtaagtagtagccgtctatatcatccatactcatcataacttcaacct

SEQ ID NO: 68 - DNA, 1000 bp, Arabidopsis thaliana
  misc_feature (1)..(1000): Ceres Promoter YP0374
aagacacccgtaaatgttgtcatgtagaagaaactagaaacgttaaacgcatcaaatcaagaaattaaattgaaggtaatttttaacgccgcctttcaaatattcttcctaggagaggctacaagacgcgtatttctttcgaattctccaaaccattaccattttgatatataataccgacatgccgttgataaagtttgtatgcaaatcgttcattgggtatgagcaaatgccatccattggttcttgtaattaaatggtccaaaaatagtttgttcccactactagttactaatttgtatcactctgcaaaataatcatgatataaacgtatgtgctatttctaattaaaactcaaaagtaatcaatgtacaatgcagagatgaccataaaagaacattaaaacactacttccactaaatctatggggtgccttggcaaggcaattgaataaggagaatgcatcaagatgatatagaaaatgctattcagtttataacattaatgttttggcggaaaattttctatatattagacctttctgtaaaaaaaaaaaaatgatgtagaaaatgctattatgtttcaaaaatttcgcactagtataatacggaacattgtagtttacactgctcattaccatgaaaaccaaggcagtatataccaacattaataaactaaatcgcgatttctagcacccccattaattaattttactattatacattctctttgcttctcgaaataataaacttctctatatcattctacataataaataagaaagaaatcgacaagatctaaatttagatctattcagctttttcgcctgagaagccaaaattgtgaatagaagaaagcagtcgtcatcttcccacgtttggacgaaataaaacataacaataataaaataataaatcaaatatataaatccctaatttgtctttattactccacaattttctatgtgtatatatatacccacctctctcttgtgtatttg

SEQ ID NO: 69 - DNA, 998 bp, Arabidopsis thaliana
  misc_feature (1)..(998): Ceres Promoter YP0377
tataaaccattcctataacaccatatttaaacataacaatgaattgcttggatttcaaactttattaaatttggattttaaattttaatttgattgaattatacccccttaattggataaattcaaatatgtcaactttttttttgtaagatttttttatggaaaaaaaaattgattattcactaaaaagatgacaggttacttataatttaatatatgtaaaccctaaaaagaagaaaatagtttctgttttcactttaggtcttattatctaaacttctttaagaaaatcgcaataaattggtttgagttctaactttaaacacattaatatttgtgtgctatttaaaaaataatttacaaaaaaaaaaacaaattgacagaaaatatcaggttttgtaataagatatttcctgataaatatttagggaatataacatatcaaaagattcaaattctgaaaatcaagaatggtagacatgtgaaagttgtcatcaatatggtccacttttctttgctctataacccaaaattgaccctgacagtcaacttgtacacgcggccaaacctttttataatcatgctatttatttccttcatttttattctatttgctatctaactgatttttcattaacatgataccagaaatgaatttagatggattaattcttttccatccacgacatctggaaacacttatctcctaattaaccttactttttttttagtttgtgtgctccttcataaaatctatattgtttaaaacaaaggtcaataaatataaatatggataagtataataaatctttattggatatttctttttttaaaaaagaaataaatcttttttggatattttcgtggcagcatcataatgagagactacgtcgaaaccgctggcaaccacttttgccgcgtttaatttctttctgaggcttatataaatagatcaaaggggaaagtgagatataatacagacaaaacaagagaaaaga

SEQ ID NO: 70 - DNA, 999 bp, Arabidopsis thaliana
  misc_feature (1)..(999): Ceres Promoter YP0380
acaagtaccattcacttttttacttttcaatgtatacaatcatcatgtgataaaaaaaaaaatgtaaccaatcaacacactgagatacggccaaaaaatggtaatacataaatgtttgtaggttttgtaatttaaatactttagttaagttatgattttattatttttgcttatcacttatacgaaatcatcaatctattggtatctcttaatcccgctttttaatttccaccgcacacgcaaatcagcaaatggttccagccacgtgcatgtgaccacatattgtggtcacagtactcgtcctttttttttcttttgtaatcaataaatttcaatcctaaaacttcacacattgagcacgtcggcaacgttagctcctaaatcataacgagcaaaaaagttcaaattagggtatatgatcaattgatcatcactacatgtctacataattaatatgtattcaaccggtcggtttgttgatactcatagttaagtatatatgtgctaattagaattaggatgaatcagttcttgcaaacaactacggtttcatataatatgggagtgttatgtacaaaatgaaagaggatggatcattctgagatgttatgggctcccagtcaatcatgttttgctcgcatatgctatcttttgagtctcttcctaaactcatagaataagcacgttggttttttccaccgtcctcctcgtgaacaaaagtacaattacattttagcaaattgaaaataaccacgtggatggaccatattatatgtgatcatattgcttgtcgtcttcgttttcttttaaatgtttacaccactacttcctgacacgtgtccctattcacatcatccttgttatatcgttttacttataaaggatcacgaacaccaaaacatcaatgtgtacgtcttttgcataagaagaaacagagagcattatcaattattaacaattacacaagacagcgagattgtaaaagagtaagagagagag

SEQ ID NO: 71 - DNA, 1000 bp, Arabidopsis thaliana
  misc_feature (1)..(1000): Ceres Promoter YP0381
cacggtcaaagtattgctaacatggtcattacattgaaaaagaaaattaattgtctttactcatgtttattctatacaaataaaaatattaaccaaccatcgcactaacaaaatagaaatcttattctaatcacttaattgttgacaattaaatcattgaaaaatacacttaaatgtcaaatattcgttttgcatacttttcaatttaaatacatttaaagttcgacaagttgcgtttactatcatagaaaactaaatctcctaccaaagcgaaatgaaactactaaagcgacaggcaggttacataacctaacaaatctccacgtgtcaattaccaagagaaaaaaagagaagataagcggaacacgtggtagcacaaaaaagataatgtgatttaaattaaaaaacaaaaacaaagacacgtgacgacctgacgctgcaacatcccaccttacaacgtaataaccactgaacataagacacgtgtacgatcttgtctttgttttctcgatgaaaaccacgtgggtgctcaaagtccttgggtcagagtcttccatgattccacgtgtcgttaatgcaccaaacaagggtactttcggtattttggcttccgcaaattagacaaaacagctttttgtttgattgatttttctcttctctttttccatctaaattctctttgggctcttaatttctttttgagtgttcgttcgagatttgtcggagattttttcggtaaatgttgaaattttgtgggatttttttttatttctttattaaacttttttttattgaatttataaaaagggaaggtcgtcattaatcgaagaaatggaatcttccaaaatttgatattttgctgttttcttgggatttgaattgctctttatcatcaagaatctgttaaaatttctaatctaaaatctaagttgagaaaaagagagatctctaatttaaccggaattaatattctccgaccgaagttattatgttgcaggct

SEQ ID NO: 72 - DNA, 999 bp, Arabidopsis thaliana
  misc_feature (1)..(999): Ceres Promoter YP0384
tttaaaaaattggataaaacaccgataaaaattcacatttgcaaattttattcagtcggaatatatatttgaaacaagttttgaaatccattggacgattaaaattcattgttgagaggataaatatggatttgttcatctgaaccatgtcgttgattagtgattgactaccatgaaaaatatgttatgaaaagtataacaacttttgataaatcacatttattaacaataaatcaagacaaaatatgtcaacaataatagtagtagaagatattaattcaaattcatccgtaacaacaaaaaatcataccacaattaagtgtacagaaaaaccttttggatatatttattgtcgcttttcaatgattttcgtgaaaaggatatatttgtgtaaaataagaaggatcttgacgggtgtaaaaacatgcacaattcttaatttagaccaatcagaagacaacacgaacacttctttattataagctattaaacaaaatcttgcctattttgcttagaataatatgaagagtgactcatcagggagtggaaaatatctcaggatttgcttttagctctaacatgtcaaactatctagatgccaacaacacaaagtgcaaattcttttaatatgaaaacaacaataatatttctaatagaaaattaaaaagggaaataaaatatttttttaaaatatacaaaagaagaaggaatccatcatcaaagttttataaaattgtaatataatacaaacttgtttgcttccttgtctctccctctgtctctctcatctctcctatcttctccatatatacttcatcttcacacccaaaactccacacaaaatatctctccctctatctgcaaattttccaaagttgcatcctttcaatttccactcctctctaatataattcacattttcccactattgctgattcatttttttttgtgaattatttcaaacccacataaaaaaatctttgtttaaatttaaaacca

SEQ ID NO: 73 - DNA, 998 bp, Arabidopsis thaliana
  misc_feature (1)..(998): Ceres Promoter YP0385
actcaacaataggacaagccaaaaaaattccaattattgtgttactctattcttctaaatttgaacactaatagactatgacatatgagtatataatgtgaagtcttaagatattttcatgtgggagatgaataggccaagttggagtctgcaaacaagaagctcttgagccacgacataagccaagttgatgaccgtaattaatgaaactaaatgtgtgtggttatatattagggacccatggccatatacacaatttttgtttctgtcgatagcatgcgtttatatatatttctaaaaaaactaacatatttactggatttgagttcgaatattgacactaatataaactacgtaccaaactacatatgtttatctatatttgattgatcgaagaattctgaactgttttagaaaatttcaatacacttaacttcatcttacaacggtaaaagaaatcaccactagacaaacaatgcctcataatgtctcgaaccctcaaactcaagagtatacattttactagattagagaatttgatatcctcaagttgccaaagaattggaagcttttgttaccaaacttagaaacagaagaagccacaaaaaaagacaaagggagttaaagattgaagtgatgcatttgtctaagtgtgaaaggtctcaagtctcaactttgaaccataataacattactcacactccctttttttttctttttttttcccaaagtaccctttttaattccctctataacccactcactccattccctctttctgtcactgattcaacacgtggccacactgatgggatccacctttcctcttacccacctcccggtttatataaacccttcacaacacttcatcgctctcaaaccaactctctcttctctcttctctcctctcttctacaagaagaaaaaaaacagagcctttacacatctcaaaatcgaacttactttaaccaccaaatactgattgaacacacttgaaa

SEQ ID NO: 74 - DNA, 1000 bp, Arabidopsis thaliana
  misc_feature (1)..(1000): Ceres Promoter YP0396
catagtaaaagtgaatttaatcatactaagtaaaataagataaaacatgttatttgaatttgaatatcgtgggatgcgtatttcggtatttgattaaaggtctggaaaccggagctcctataacccgaataaaaatgcataacatgttcttccccaacgaggcgagcgggtcagggcactagggtcattgcaggcagctcataaagtcatgatcatctaggagatcaaattgtatgtcggccttctcaaaattacctctaagaatctcaaacccaatcatagaacctctaaaaagacaaagtcgtcgctttagaatgggttcggtttttggaaccatatttcacgtcaatttaatgtttagtataatttctgaacaacagaattttggatttatttgcacgtatacaaatatctaattaataaggacgactcgtgactatccttacattaagtttcactgtcgaaataacatagtacaatacttgtcgttaatttccacgtctcaagtctataccgtcatttacggagaaagaacatctctgtttttcatccaaactactattctcactttgtctatatatttaaaattaagtaaaaaagactcaatagtccaataaaatgatgaccaaatgagaagatggttttgtgccagattttaggaaaagtgagtcaaggtttcacatctcaaatttgactgcataatcttcgccattaacaacggcattatatatgtcaagccaattttccatgttgcgtacttttctattgaggtgaaaatatgggtttgttgattaatcaaagagtttgcctaactaatataactacgactttttcagtgaccattccatgtaaactctgcttagtgtttcatttgtcaacaatattgtcgttactcattaaatcaaggaaaaatatacaattgtataattttcttatattttaaaattaattttgatgtattacccctttataaataggctatcgctacaacaccaataac

SEQ ID NO: 75 - DNA, 1514 bp, Arabidopsis thaliana
  misc_feature (1)..(1514): Ceres Promoter p13879
tttcgatcctcttcttttttaggtttcttgatttgatgatcgccgccagtagagccgtcgtcggaagtttcagagattaaaaccatcaccgtgtgagttggtagcgaattaacggaaagtctaagtcaagattttttaaaaagaaatttatgtgtgaaaagaagccgttgtgtatatttatataatttagaaaatgtttcatcattttaattaaaaaattaataatttgtagaagaaagaagcattttttatacataaatcatttaccttctttactgtgtttttcttcacttacttcatttttacttttttacaaaaaagtgaaaagtaaattacgtaattggtaacataaattcactttaaatttgcatatgttttgttttcttcggaaactatatcgaaaagcaaacggaaagaacttcacaaaaaaccctagctaactaaagacgcatgtgttcttcttattcttcatatatcctctgtttcttgtgttctgttttgagtcttacattttcaatatctgactctgattactatatctaaaagggaacatgaagaacttgagaccatgttaaactgtacaatgccttcaaacatggctaactaaagatacattagatggctttacagtgtgtaatgcttattatctttaggttttttaaatcccttgtattaagttatttaccaaattatgttcttgtactgcttattggcttggttgttgtgtgctttgtaaacaacacctttggctttatttcatcctttgtaaacctactggtctttgttcagctcctcttggaagtgagtttgtatgcctggaacgggttttaatggagtgtttatcgacaaaaaaaaaatgtagcttttgaaatcacagagagtagttttatattcaaattacatgcatgcaactaagtagcaacaaagttgatatggccgagttggtctaaggcgccagattaaggttctggtccgaaagggcgtgggttcaaatcccactgtcaacattctctttttctcaaattaatatttttctgcctcaatggttcaggcccaattatactagactactatcgcgactaaaatagggactagccgaattgatccggcccagtatcagttgtgtatcaccacgttatttcaaatttcaaactaagggataaagatgtcatttgacatatgagatatttttttgctccactgagatatttttctttgtcccaagataaaatatcttttctcgcatcgtcgtctttccatttgcgcattaaaccaaaaagtgtcacgtgatatgtccccaaccactacgaattttaactacagatttaaccatggttaaaccagaattcacgtaaaccgactctaaacctagaaaatatctaaaccttggttaatatctcagcccccttataaataacgagacttcgtctacatcgttctacacatctcactgctcactactctcactgtaatcccttagatcttcttttcaaatttcaccattgcactggatg

SEQ ID NO: 76 - DNA, 1954 bp, Arabidopsis thaliana
  misc_feature (1)..(1954): Ceres Promoter p326
gtgggtaaaagtatccttctttgtgcatttggtatttttaagcatgtaataagaaaaaccaaaatagacggctggtatttaataaaaggagactaatgtatgtatagtatatgatttgtgtggaatataataaagttgtaaaatatagatgtgaagcgagtatctatcttttgactttcaaaggtgatcgatcgtgttctttgtgatagttttggtcgtcggtctacaagtcaacaaccaccttgaagttttcgcgtctcggtttcctcttcgcatctggtatccaatagcatacatataccagtgcggaaaatggcgaagactagtgggcttgaaccataaggtttggccccaatacggattccaaacaacaagcctagcgcagtcttttgggatgcataagactaaactgtcgcagtgatagacgtaagatatatcgacttgattggaatcgtctaagctaataagtttaccttgaccgtttatagttgcgtcaacgtccttatggagattgatgcccatcaaataaacctgaaaatccatcaccatgaccaccataaactcccttgctgccgctgctttggcttgagcaaggtgtttccttgtaaagctccgatctttggataaagtgttccactttttgcaagtagctctgacccctctcagagatgtcaccggaatcttagacagaacctcctctgccaaatcacttggaagatcggacaatgtcatcatttttgcaggtaatttctccttcgttgctgctttggcttgagcacggtgcttctttgtaaagctccgatctttggataagagcggatcggaatcctctaggaggtgccagtcccttgacctattaatttatagaaggttttagtgtattttgttccaatttcttctctaacttaacaaataacaactgcctcatagtcatgggcttcaaattttatcgcttggtgtatttcgttatttgcaaggccttggcccattttgagcccaataactaaatctagccttttcagaccggacatgaacttcgcatattggcgtaactgtgcagttttacctttttcggatcagacaagatcagatttagaccacccaacaatagtcagtcatatttgacaacctaagctagccgacactactaaaaagcaaacaaaagaagaattctatgttgtcattttaccggtggcaagtggacccttctataaaagagtaaagagacagcctgtgtgtgtataatctctaattatgttcaccgacacaatcacacaaacccttctctaatcacacaacttcttcatgatttacgacattaattatcattaactctttaaattcactttacatgctcaaaaatatctaatttgcagcattaatttgagtaccgataactattattataatcgtcgtgattcgcaatcttcttcattagatgctgtcaagttgtactcgcacgcggtggtccagtgaagcaaatccaacggtttaaaaccttcttacatttctagatctaatctgaaccgtcagatatctagatctcattgtctgaacacagttagatgaaactgggaatgaatctggacgaaattacgatcttacaccaaccccctcgacgagctcgtatatataaagcttatacgctcctccttcaccttcgtactactactaccaccacatttctttagctcaaccttcattactaatctccttttaaggtatgttcacttttcttcgattcatactttctcaagattcctgcatttctgtagaatttgaaccaagtgtcgatttttgtttgagagaagtgttgatttatagatctggttattgaatctagattccaatttttaattgattcgagtttgttatgtgtgtttatactacttctcattgatcttgtttgatttctctgctctgtattaggtttctttcgtgaatcagatcggaa

SEQ ID NO: 77 - DNA, 2016 bp, Arabidopsis thaliana
  misc_feature (1)..(2016): Ceres Promoter p32449
gatcggccttcttcaggtcttctctgtagctctgttacttctatcacagttatcgggtatttgagaaaaaagagttagctaaaatgaatttctccatataatcatggtttactacaggtttacttgattcgcgttagctttatctgcatccaaagttttttccatgatgttatgtcatatgtgataccgttactatgtttataactttatacagtctggttcactggagtttctgtgattatgttgagtacatactcattcatcctttggtaactctcaagtttaggttgtttgaattgcctctgttgtgatacttattgtctattgcatcaatcttctaatgcaccaccctagactatttgaacaaagagctgtttcattcttaaacctctgtgtctccttgctaaatggtcatgctttaatgtcttcacctgtctttctcttctatagatatgtagtcttgctagatagttagttctacagctctcttttgtagtcttgttagagagttagttgagatattacctcttaaaagtatccttgaacgctttccggttatgaccaatttgttgtagctccttgtaagtagaacttactgggaccagcgagacagtttatgtgaatgttcatgcttaagtgtcgaacgtatctatctctactatagctctgtagtcttgttagacagttagttttatatctccatttttttgtagtcttgctagttgagatattacctcttctcttcaaagtatccttgaacgctcaccggttatgaaatctctacactatagctctgtagtcttgctagatagttagttctttagctctctttttgtagcctagttctttagctctccttttgtagccttgctacagagtaagatgggatattacctccttgaacgctctccggttatgaccaatttgttgtagctccttgtaagtagaacttaggatagagtgagtcaactttaagaaagaacctagtatgtggcataaccagattgcaggctctgtctcggctacagtaacgtaactctatagctctttgttttgttcagaaagaaccagtgattggatgattcgtccttagaaactggacctaacaacagtcattggctttgaaatcaagccacaacaatgcctatatgaaccgtccatttcatttatccgtttcaaaccagcccattacatttcgtcccattgataaccaaaagcggttcaatcagattatgttttaattttaccaaattctttatgaagtttaaattatactcacattaaaaggattattggataatgtaaaaattctgaacaattactgattttggaaaattaacaaatattctttgaaatagaagaaaaagcctttttccttttgacaacaacatataaaatcatactcccattaaaaagattttaatgtaaaattctgaatataagatattttttacaacaacaaccaaaaatatttatttttttccttttttacagcaacaagaaggaaaaacttttttttttgtcaagaaaaggggagattatgtaaacagataaaacagggaaaataactaaccgaactctcttaattaacatcttcaaataaggaaaattatgatccgcatatttaggaagatcaatgcattaaaacaacttgcacgtggaaagagagactatacgctccacacaagttgcactaatggtacctctcacaaaccaatcaaaatactgaataatgccaacgtgtacaaattagggttttacctcacaaccatcgaacattctcgaaacattttaaacagcctggcgccatagatctaaactctcatcgaccaatttttgaccgtccgatggaaactctagcctcaacccaaaactctatataaagaaatcttttccttcgttattgcttaccaaatacaaaccctagccgccttattcgtcttcttcgttctctagttttttcctcagtctctgttcttagatcccttgtagtttccaaatcttccgataaggcct

SEQ ID NO: 78 - DNA, 857 bp, Arabidopsis thaliana
  misc_feature (1)..(857): Ceres Promoter PD1367
  misc_feature (116)..(116): n is a, c, t, g, unknown, or other
  misc_feature (136)..(136): n is a, c, t, g, unknown, or other
  misc_feature (154)..(154): n is a, c, t, g, unknown, or other
  misc_feature (159)..(159): n is a, c, t, g, unknown, or other
  misc_feature (168)..(168): n is a, c, t, g, unknown, or other
  misc_feature (172)..(172): n is a, c, t, g, unknown, or other
  misc_feature (175)..(175): n is a, c, t, g, unknown, or other
  misc_feature (679)..(679): n is a, c, t, g, unknown, or other
  misc_feature (680)..(680): n is a, c, t, g, unknown, or other
  misc_feature (686)..(686): n is a, c, t, g, unknown, or other
  misc_feature (724)..(724): n is a, c, t, g, unknown, or other
  misc_feature (737)..(737): n is a, c, t, g, unknown, or other
ttggaattaattctgcggccatggggctgcaggaattcgatggcccgatcggccacagttttcttttctcatcttacaacaagtttccaggaggatagagacataaacgaagctcnggattgtatcgttctttttnagcttttattcacatccngaaangtcctgtangttntangattctgttatcttgcggttttgagttaatcagaaacagagtaatcaatgtaatgttgcaggctagatctttcatctttggaaatttgtttttttctcatgcaatttctttagcttgaccatgagtgactaaaagatcaatcagtagcaatgatttgatttggctaagagacatttgtccacttggcatcttgatttggatggttacaacttgcaagacccaattggatacttgctatgacaactccaactcaagagtgtcgtgtaactaagaaccttgactaatttgtaatttcaatcccaagtcatgttactatatgtttttttgtttgtattattttctctcctacaattaagctctttgacgtacgtaatctccggaaccaactcctatatccaccatttactccacgttgtctccaattattggacgttgaaacttgacacaacgtaaacgtatctacgtggttgattgtatgtacatatgtacaaacgtacacctttnnctcctnctttcacttcatcacttggcttgtgaattcattaattncctgcgaaggccntgcagggccatcaccactgcagtggaacaatgaagactaatctttttctctttctcatcttttcacttctcctatcattatcctcggccgaattcagtaaaggagaagaacttttcactg

SEQ ID NO: 79 - DNA, 1687 bp, Arabidopsis thaliana
  misc_feature (1)..(1687): Ceres CDNA ID no. 12321246
  misc_feature (1)..(1687): Also Known As  Ceres SEEDLINE ME01347
  misc_feature (1)..(1687): Also Known As  Ceres CLONE ID no. 13745
atccgaacacaaagacttaagtaagtcaaacagaaaaaaatggatctcttattgattatagccggtttagtagcggctgcagccttctttttcctccgtagcacgaccaagaaatctctccggttacctccgggaccaaaaggtcttcctattataggaaaccttcaccagatggagaaattcaacccccaacacttccttttccgtctctccaagctatacggcccgattttcacgatgaaaatcggtggccgtcgcctcgcggtgatctcctcggccgagctagccaaggagctactcaaaactcaagacctcaacttcaccgctcgtcctctcttgaaagggcaacaaaccatgtcgtatcaaggccgtgagcttggtttcggacagtacaccgcgtactaccgtgagatgaggaagatgtgtatggtgaacctcttcagcccgaaccgtgtcgcaagtttcagaccggttagagaagaagagtgtcaacggatgatggacaagatctataaagccgctgatcaatcaggcaccgttgatctaagtgagcttctcttgtctttcactaactgtgtcgtatgtagacaagcttttgggaaacggtacaatgagtacggcacagagatgaagagattcatagatatcttgtacgagacgcaagcacttttgggcactctgtttttctccgaccttttcccttatttcggattccttgacaacctcactggtctcagtgcacgtctcaagaaagctttcaaggagcttgacacttaccttcaagaacttctagacgagactcttgaccctaaccgccctaaacaagaaacagagagtttcattgatcttttgatgcagatctacaaagaccaacctttctccatcaaattcactcacgaaaatgtcaaggccatgatattggatattgttgtgccgggaactgacacggcggctgcagtggtggtatgggccatgacttaccttattaagtaccctgaagcaatgaagaaagctcaagacgaagtgaggagtgtgataggtgacaaaggatatgtctctgaagaagacatacctaatctcccttacctaaaggcagtcatcaaggagtctcttcggctcgaaccagtcatccccattcttctacacagagaaactatcgcagacgcaaagataggtggctatgatattccggccaagaccatcattcaggtgaacgcatgggcggtttctcgtgacacagccgcgtggggagacaaccctaatgagttcattccagagaggttcatgaacgagcacaaaggagtggacttcaagggccaagattttgagctcctacctttcgggtcgggccggagaatgtgcccggccatgcatcttgggattgcaatggtagagatacctttcgctaaccttctctacaaatttgactggagtctacctaaagggattaaaccagaggatataaagatggacgtcatgactggactcgctatgcacaagaaagaacacctcgttcttgcaccaacgaaacacatctgatgctatatatatcattaggacgtttctgctggtagatatggcgtgaccaatggttatttttcattgcaatatccctttttgttttaatgagtactatgttctcattttaacgaataaaaatgtatcagtgctcttgtttttggactag

SEQ ID NO: 80 - protein, 499 aa, Arabidopsis thaliana
  misc_feature (1)..(499): Ceres CDNA ID no. 12321246
  misc_feature (1)..(499): Also Known As  Ceres SEEDLINE ME01347
  misc_feature (1)..(499): Also Known As  Ceres CLONE ID no. 13745
  misc_feature (30)..(494): Pfam Name: p450 Pfam Description: Cytochrome P450
  misc_feature: Phenotype: Dark Green Useful for increasing chlorophyll and photosynthetic capacity
  misc_feature: Phenotype: Reduced fertility Useful for sterility, genetic confinement systems
MDLLLIIAGLVAAAAFFFLRSTTKKSLRLPPGPKGLPIIGNLHQMEKFNPQHFLFRLSKLYGPIFTMKIGGRRLAVISSAELAKELLKTQDLNFTARPLLKGQQTMSYQGRELGFGQYTAYYREMRKMCMVNLFSPNRVASFRPVREEECQRMMDKIYKAADQSGTVDLSELLLSFTNCVVCRQAFGKRYNEYGTEMKRFIDILYETQALLGTLFFSDLFPYFGFLDNLTGLSARLKKAFKELDTYLQELLDETLDPNRPKQETESFIDLLMQIYKDQPFSIKFTHENVKAMILDIVVPGTDTAAAVVVWAMTYLIKYPEAMKKAQDEVRSVIGDKGYVSEEDIPNLPYLKAVIKESLRLEPVIPILLHRETIADAKIGGYDIPAKTIIQVNAWAVSRDTAAWGDNPNEFIPERFMNEHKGVDFKGQDFELLPFGSGRRMCPAMHLGIAMVEIPFANLLYKFDWSLPKGIKPEDIKMDVMTGLAMHKKEHLVLAPTKHI

SEQ ID NO: 81 - DNA, 1515 bp, Populus balsamifera subsp. trichocarpa
  misc_feature (1)..(1515): Ceres GDNA ANNOT ID no. 1442604
atggcattactcatattcgtaattctcttcctctccatcattttcttgtttcttctcaagaaaaacaaaatctctaaaagagcttgtttccctcctggccccaacggtcttcccttgataggtaacttgcaccagcttgatagctcaaaccttcaaacgcaattatggaaactatctcaaaaatatggccccctcatgtccttaaagctaggtttcaagcgaaccctcgtcatctcttcagccaaaatggctgaagaggtactgaaaacccatgatcttgaattttgtagcaggcctctcttgactggccagcaaaaattttcctacaatggtttagacttggccttttcaccatatggtgcttattggagggagatgaaaaaaatatgtgtcgttcatctcctcaactcgacacgagtgcaaagttttcgtaccaacagagaagatgaggtatcgcatatgattgaaaaaatttccaaagcagctcttgcttctaaacccttcaacttgactgaaggaatgctgtctcttacaagcacagccatatgcagaactgcctttggaaaaaggtacgaggatggaggaattgaaggaagtaggttccttgcgttgcttaatgaaaccgaagccctgtttacgatgttttttctttctgattattttccatacatgggatgggttgatagactcacgggacgcgcccatcgtcttgaaaaaaatttcagagagtttgatgttttctaccaacaaattattgatgaacatcttgatccagagcgaccaaagccagaccatgaggacatacttgacgttttgcttcaaatatacaaggatcgcacttttaaagttcaactaacgcttgatcacatcaaagcaattctaatgaacatatttgttggtgggactgatacagctgctgctactgtgatctgggccatgagccttctaatgaaaaaccctgaagcaatgagaaaagctcaagaagaagttcgaaaggtgataggagataaaggttttgtgtacgaagatgatgttcaacaattgccttaccttaaagctgtggttaaagagaccatgagattgcaaccaacagcaccactactagtcccaagagaaacaactacggagtgtaacataggtgggtacgaaataccagccaagaccttagtttacgtcaatgcgtgggctattggaagggacacagaagtttgggagaacccgtatgtgttcattcctgataggttcttgggcagttctattgatttgaaaggacaagattttgagctgataccatttggtgcgggtcgaagaatttgtcctggtatatatatgggaattgccaccgtggagctttcactttctaatcttctctacaaattcgactgggaaatgcctggtgggatgaagagggaagacatagacgttgatcatacgcaacccggtcttgctatgcatacgagggacgctctctgcctcgtgcctaaggcgtatgctgtgatgggcaatgatgcgtaa

SEQ ID NO: 82 - protein, 439 aa, Populus balsamifera subsp. trichocarpa
  misc_feature (1)..(439): Ceres GDNA ANNOT ID no. 1442604
  misc_feature (1)..(439)
  Functional Homolog of CDNA ID no. 12321246at SEQ ID no. 80with e-value of 7.5E-127 and percent identity of 54.57
MSLKLGFKRTLVISSAKMAEEVLKTHDLEFCSRPLLTGQQKFSYNGLDLAFSPYGAYWREMKKICVVHLLNSTRVQSFRTNREDEVSHMIEKISKAALASKPFNLTEGMLSLTSTAICRTAFGKRYEDGGIEGSRFLALLNETEALFTMFFLSDYFPYMGWVDRLTGRAHRLEKNFREFDVFYQQIIDEHLDPERPKPDHEDILDVLLQIYKDRTFKVQLTLDHIKAILMNIFVGGTDTAAATVIWAMSLLMKNPEAMRKAQEEVRKVIGDKGFVYEDDVQQLPYLKAVVKETMRLQPTAPLLVPRETTTECNIGGYEIPAKTLVYVNAWAIGRDTEVWENPYVFIPDRFLGSSIDLKGQDFELIPFGAGRRICPGIYMGIATVELSLSNLLYKFDWEMPGGMKREDIDVDHTQPGLAMHTRDALCLVPKAYAVMGNDA

SEQ ID NO: 83 - DNA, 1542 bp, Populus balsamifera subsp. trichocarpa
  misc_feature (1)..(1542): Ceres GDNA ANNOT ID no. 1442608
atggctttattcgacttcctaattctatctgtccccattttcctcttgtttcttctgatcaagagaaacaaaaccactaaaaaagcctgtttgcctcctggtcctgatggtcttcccttcataggtaacttacaccagcttggcaattccaaccttcatcagtatctatggaaactctctcaaaaacatggccccctcgtgtacttgaggctaggtttcaagccagccctgatagtctcttcagccaaaatggctagagagatattgaaaactcatgacctcgaattttgtagcaggcctgccttgacggtcatgaaaaaattttcctacaatggcttagacttggctttggcaccatatggagcttattggagggaggtgaaaaaaatatgtgtcgttcgtgtctttagctcaattcgagcacaaagtttccgtcccattagagaagatgaggtttctcgtatgattgaaaacatatccaaatcagctcttgcttctaaaccattcaacttgactgaagaattggtgtctctcacaagcacaacaatatgcagagttgcctttggaaaaaggtatgaaattggaggaagcgataaaaataggttcctagagttgcttcacgaaatccaggcaatggtttcaagctttttcctttcggattattttccttgcttgggctggctcgtcgataaactaaccggactgtcctatcgtctggaaaagagtttcaaagaatttgatgctttcttcaaaggaataattgatgataagcttgatccaaataggcctaagcccgagagggaggatactatacttgactttttgcttcagatatacaaggatggctcatttaaagttcagctaaccctggatcacatcaaagcaattctaatggacatatttcttgcggggacagacacaagtgcagttactatgaattgggccatgacctttctaatgaagaatcctaaagcaatgcgaaaagctcaagaagaagttagaaatttatttggaaataaaggttttgtgcatgaagatgatgttcaacaattgccttacctgaaagctgtggttaaagagaccatgagattgcaaccaacagcaccactactaatcccaagagaaacaaccaaggagtgttgcgtaggtgggtacgaaataccagccaagaccttggtttacgtgagtgcttgggctgttggaagggacccggaagcttgggagaacccatatgagttcaatcctgatagattcttgggcagttccattgatctgaaaggaaatgattttgagcttataccatttggtgctggtcgaagaatttgtcctgggatatttattgcactcgccactgtggagctttcacttgcgaatcttcttcataaatttgactgggaaatgccatctggggtggaagatatagacatggatgatgtgctacccggtcttgttcctcatatgagggatgctctctgccttgtgcctaagtttgtgtgtgatggggaaacagggcataaaggcaccgcagttcatgattattag

SEQ ID NO: 84 - protein, 430 aa, Populus balsamifera subsp. trichocarpa
  misc_feature (1)..(430): Ceres GDNA ANNOT ID no. 1442608
  misc_feature (1)..(430)
  Functional Homolog of CDNA ID no. 12321246at SEQ ID no. 80with e-value of 2.2E-113 and percent identity of 51.10
MAREILKTHDLEFCSRPALTVMKKFSYNGLDLALAPYGAYWREVKKICVVRVFSSIRAQSFRPIREDEVSRMIENISKSALASKPFNLTEELVSLTSTTICRVAFGKRYEIGGSDKNRFLELLHEIQAMVSSFFLSDYFPCLGWLVDKLTGLSYRLEKSFKEFDAFFKGIIDDKLDPNRPKPEREDTILDFLLQIYKDGSFKVQLTLDHIKAILMDIFLAGTDTSAVTMNWAMTFLMKNPKAMRKAQEEVRNLFGNKGFVHEDDVQQLPYLKAVVKETMRLQPTAPLLIPRETTKECCVGGYEIPAKTLVYVSAWAVGRDPEAWENPYEFNPDRFLGSSIDLKGNDFELIPFGAGRRICPGIFIALATVELSLANLLHKFDWEMPSGVEDIDMDDVLPGLVPHMRDALCLVPKFVCDGETGHKGTAVHDY

SEQ ID NO: 85 - DNA, 1584 bp, Populus balsamifera subsp. trichocarpa
  misc_feature (1)..(1584): Ceres GDNA ANNOT ID no. 1452827
atggcaatgtttttcttccttggagctttctttatcttcgtcttgtttcttctccaaacttacagaaccaaaagaaaaattcttcttccgcctggtccctatggacttcctttaatcggtaacttgcatcaatttgtacagtacaaatcaccccctcaccattacctgtggcaactctcgcacaaatacgggccgctcatgtccttgagacgaggttttgtgccaactctggtagtttcttcagctaaaatggccaaagaggttatgggaaagcattatctggagttctctggtaggccttccttacatggccagcaaaaattgtcttataacggcctagacttggcttttacaccatatggtgattattggagggagatgaggaagatttgtgttcttcgactctttaacttgaaacgagtgcaatcttttcattccattcgtgaaaatgaggtttcttgtatgattcaaaaaataaggaaagcagccgatgcttccaggactgccaacttgagtgaagcagtgactgcccttacaagcttcatagtttgtagagttgcctttgggaagagttatgaggatcaaggtagtgaaagaagtaaatttcataaccttcttaatgaagcacaggccatggcggctagtctttttgtttcggattatcttcctttcatgggatggattgataaactcactggattgatggctcgcctggaaaagaatttcagcgaatttgatgttttctaccaagaaataattgacgagcacctggatccaaagagaaccaaacctgagaaagaggacatcattgacgtgttacttcgcctgaaaaaggaacgctcatttgcatttgatctcaatcgggatcacatcaaagcagtgctaatggtcatcaataagtttctcaattcattttacacaagtgcaggcaccttggagtgggccatgacagctctaatgaaggaacctagagtgatgaacaaagtccaagaagaagttagaaatttagttggtgacagaaaactcgtgaaagaagacgatctcttaagattaccatgtctgaaggcagtggtgaaagagacatggagattgcatccagcggctccattgctactcccacgagaaacaatacaaaattgcaacatagatgggtatgatataccagctagaactctagtttttgtgaatgcgtgggcaattggaagggatcctgaagcgtgggaaatcccagaagagttctatcctgaaagattctttggcaagtctgtagactttaaaggacaagattatgaactgataccatttggtaccggtcgaagaggctgtccagggatacatatgggagctgtgactgtggagcttgcacttgctaatcttctttacaactttgactgggaaatgccgcaaggattgaaagctgaagacatagacatggacgttctgccgggtctcagcacgcacaagaaaaacgctttatgtgccttatgcctaggaactattttcatatatcaagtgtttgatgttgtaatgtactatacggagccatatcaatctgtctcgttttatccacacaaacaggggtag

SEQ ID NO: 86 - protein, 527 aa, Populus balsamifera subsp. trichocarpa
  misc_feature (1)..(527): Ceres GDNA ANNOT ID no. 1452827
  misc_feature (1)..(527)
  Functional Homolog of CDNA ID no. 12321246at SEQ ID no. 80with e-value of 2.6E-124 and percent identity of 50.63
MAMFFFLGAFFIFVLFLLQTYRTKRKILLPPGPYGLPLIGNLHQFVQYKSPPHHYLWQLSHKYGPLMSLRRGFVPTLVVSSAKMAKEVMGKHYLEFSGRPSLHGQQKLSYNGLDLAFTPYGDYWREMRKICVLRLFNLKRVQSFHSIRENEVSCMIQKIRKAADASRTANLSEAVTALTSFIVCRVAFGKSYEDQGSERSKFHNLLNEAQAMAASLFVSDYLPFMGWIDKLTGLMARLEKNFSEFDVFYQEIIDEHLDPKRTKPEKEDIIDVLLRLKKERSFAFDLNRDHIKAVLMVINKFLNSFYTSAGTLEWAMTALMKEPRVMNKVQEEVRNLVGDRKLVKEDDLLRLPCLKAVVKETWRLHPAAPLLLPRETIQNCNIDGYDIPARTLVFVNAWAIGRDPEAWEIPEEFYPERFFGKSVDFKGQDYELIPFGTGRRGCPGIHMGAVTVELALANLLYNFDWEMPQGLKAEDIDMDVLPGLSTHKKNALCALCLGTIFIYQVFDVVMYYTEPYQSVSFYPHKQG

SEQ ID NO: 87 - DNA, 1542 bp, Populus balsamifera subsp. trichocarpa
  misc_feature (1)..(1542): Ceres GDNA ANNOT ID no. 1442612
atggctttatccgacttcctaattctatctgtccccattttcctcttgtttcttctgatcaagagaaacaaaaccactaaaaaagcctgtttgcctcctggtcctgatggtcttcccttcataggtaacttacaccagcttggcaattccaaccttcatcagtatctatggaagctctctcaaaaacatggccccctcatgcacttgaggctaggattcaagccagccctgatagtctcttcagccaaaatggctagagagatattgaaaactcatgacctcgaattttgtagcaggcctgccttgactgccacgaaaaaaatgacctacaatggcttagacttggctttcgcaccatatggagcttattggagggaggtgaaaaaaatatgtgtcgttcgtgtctttagctcaattcgagcacaaagtttccgtcccattagagaagatgaggtttctcgtatgattgaaaacatatccaaatcagctcttgcttctaaaccattcaacttgactgaagaattggtgtctctcacaagcacaacaatatgcagagttgcctttggaaaaaggtatgaaattggaggaagcgataaaaataggttcctagagttgcttcacgaaatccaggctatggcttcaagctttttcctttcggattattttccttgcttgggctggctcgtcgataaactaaccggactgtcctatcgtctggaaaagagtttcaaagaatttgatgctttctacaaaggaatcattgatgacaatattgatccaaataggcctaagcccgagagggaggatactatacttgattttttgcttcagatatacaaggagggctcatttaaagttcagctaaccctggatcacatcaaagcaattctaatggacatatttcttgcggggacagacacaagtgcagttactatgaattgggccatgacctttctaatgaagaatcctaaagcaatgcgaaaagctcaagaagaagttagaaatttatttggaaataaaggttttgtggatgaagatgatgttcaacaattgccttacctgaaagctgtggttaaagagaccatgagattgcaaccaacagcaccactactaatcccaagagaaacaaccaaggagtgttgcgtaggtgggtacgaaataccagccaagaccttggtttacgtgagtgcttgggctgttggaagggacccggaagcttgggagaacccatatgagttcaatcctgatagattcttgggcagttccattgatctgaaaggaaatgattttgagcttataccatttggtgctggtcgaagaatttgtcctgggatatttattgcactcgccactgtggagctttcacttgcgaatcttcttcataaatttgactgggaaatgccatctggggtggaagatatagacatggatgatgtgctacccggtcttgttcctcatatgagggatgctctctgccttgtgcctaagcttgtgtgtgatggggaaatagggcataaaggcaccgcagttcatgattattag

SEQ ID NO: 88 - protein, 447 aa, Populus balsamifera subsp. trichocarpa
  misc_feature (1)..(447): Ceres GDNA ANNOT ID no. 1442612
  misc_feature (1)..(447)
  Functional Homolog of CDNA ID no. 12321246at SEQ ID no. 80with e-value of 1.8E-116 and percent identity of 50.00
MHLRLGFKPALIVSSAKMAREILKTHDLEFCSRPALTATKKMTYNGLDLAFAPYGAYWREVKKICVVRVFSSIRAQSFRPIREDEVSRMIENISKSALASKPFNLTEELVSLTSTTICRVAFGKRYEIGGSDKNRFLELLHEIQAMASSFFLSDYFPCLGWLVDKLTGLSYRLEKSFKEFDAFYKGIIDDNIDPNRPKPEREDTILDFLLQIYKEGSFKVQLTLDHIKAILMDIFLAGTDTSAVTMNWAMTFLMKNPKAMRKAQEEVRNLFGNKGFVDEDDVQQLPYLKAVVKETMRLQPTAPLLIPRETTKECCVGGYEIPAKTLVYVSAWAVGRDPEAWENPYEFNPDRFLGSSIDLKGNDFELIPFGAGRRICPGIFIALATVELSLANLLHKFDWEMPSGVEDIDMDDVLPGLVPHMRDALCLVPKLVCDGEIGHKGTAVHDY

SEQ ID NO: 89 - protein, 499 aa, Glycine max
  misc_feature (1)..(499): Ceres CLONE ID no. 522267
  misc_feature (1)..(499)
  Functional Homolog of CDNA ID no. 12321246at SEQ ID no. 80with e-value of 1.8E-119 and percent identity of 47.27
MLPLVYILIALPAVVLLLILFKANKNNPPRPPGPRGLPIIGNLHQLDASKLNLQLGQLSKTYGPLFSLRIGFKPALVVSSPKLAKEVLKDHDLDVCTRPPSLGPLKLTYNALELIFSPYNDHWREIRKICVVHFFSSKRISAFSHVRKSEAKRMLQIVSSHVDSSKTTNLTEVLMAVSSAIICRLAFGRKYDDDGAEKSRFHGLLNDSQAMLLSFFVSDYIPFLGWIDKLTGMVTRLEKTFEALDGFLQEVLDEHLDPNRVKVKQNEEKDLVDLLLELKKQGRLSIDLTDDQIKAIILDILIAGTDTTAATSVWVMTGLIKNPRAMGKAQEEIRNLSGNKELIEEEDVQKLVYLKAVIKETLRVYAPTPLVPREAIRSFTIEGYEIQPKTIVYVNGWSIQRDPEAWKDPEEFYPERFLNNEIDFKGQDFEFIPFGAGRRICPGISLGIATVELITANLLNSFHWEMPQGMKPEHIDTEGLPGLARHKKNHLCLVAKKRM

SEQ ID NO: 90 - protein, 499 aa, Glycine max
  misc_feature (1)..(499): Ceres CLONE ID no. 474116
  misc_feature (1)..(499)
  Functional Homolog of CDNA ID no. 12321246at SEQ ID no. 80with e-value of 1.3E-111 and percent identity of 47.57
MWSPIVLLLCLIPPVFLLFFFQYRRTFKNSNLPPGPRGLPIIGNLHQLDSSNLHLQLWKLSKKYGPIFSLQLGLRPAIVISSSKVAKEALKTHDVEFSGRPKLLGQQKLSYNGKDISFSPNGSYWREMRKLCVVHVLSSRRVSSFSSIINCEVKQMIKKISRHASSLKVTNLNEVLISLTCAIICRIAFGRRYEDEGTERSRFQELLNECEAMLSIFFVSDYVPFLGWIDKLSGLQARLEKSFKELDKFSQEVIEEHMDPNRRTSKEEDIIDVLLQLKKKRSFSTDLTIDHIKAVFMDLLIAATDPTAATTVWAMTELVRHPRVMKKVQEEIRNLGGKKDFLEENDIQKFPYFKAVIKETLRLYPPVPLLLPKETNENCIIDGYEIAAKTLVYVNALAIQRDPEIWEDPEEFLPERFLYSTIDFRGQDFELIPFGAGRRSCPGMLMATASLDLILANLLYLFDWELPAGMKKEDIDTEVLPGLVQYKKNPLCILAKCHM

SEQ ID NO: 91 - DNA, 1499 bp, Arabidopsis thaliana
  misc_feature (1)..(1499): Ceres CDNA ID no. 12330770
  misc_feature (1)..(1499)
  Functional Homolog of CDNA ID no. 12330770at SEQ ID no. 92with e-value of 0 and percent identity of 100.00
  misc_feature (1)..(1499): Also Known As  Ceres SEEDLINE ME01395
  misc_feature (1)..(1499): Also Known As  Ceres CLONE ID no. 151087
atcaatggaggtttttgattcgccccaagctctcgcgattcctgatgttcttcagtaatttcttgcaatccttataaacaaagagcgtggagaatcgtttcagaggaaagaaaactaaaaatggcgactcttttcaacaaatttcagcaggctgttggagttcttgccaagagtaccacatttgctaagaacccaaggcaactgcagtttgaagcagacgttaacaaactctttatgtatacaagctataaccggttgggacgagaagctgaggagactgatgcagaggagatcattgagatggctggtaaagccactttatctgagcagcagaagcaagttcaagagaacattcactaccaagttgaaaaattctgctctttgatggatggaatccttcttcctgatgttaggaggaacgagtcggggtcacaatcaacaagccctcgtcctcctcgtagaagtggtcttactttcgccattggtagtaataatgcttttccacatgcagatcagccccttgttcccgagacaaagcctttgaaactcaatgacgtctcacagagattaatggatcaaatgggttacaccctcgagaccaaaccgtctgtaatacctcacaaagacgctggtcaaggttgttttatcaaaggcgaggcagatgttggaaccgtcttagccttttaccctggagttatttactctcctgctttctacaagtacatacccgggtacccgaaggttgattcacagaactcatatctcatcaccaggtatgatgggactgtaataaatgctcaaccttggggtcttgggggagaatcaagggaagcatggaacgggtcctacacacctgcggtcaaagcaaacaccaaaaccgcagaaaacgggtcagacaggttatggaaagcgttgagcaagcctctcgaaggttcgggtaaaggaaaagaggttcttgagaggagaaatccgttggcttttggtcacttagctaaccacccagcgaaagagatgactccaaacgttatgatatgtccttatgacttccctttgatggcgaaagatctgcggccttacattccgaatatatcttttggggattctggagaaataaagatgaaaagatttggaagtttctggtttaagacagggagtaaaaacgggttagaagctccggttctgaagacactggtcttggtggcaacgaggtcgttgtgtaatgaggaacttttgctgaattacaggctgagcaactctaagagacgaccagattggtatactccggttaacgaggaggaagataggagaagatggagctaaatttctcttttatgttttaatgaaacttgaaaggctctgtttcaaaacatgctcctcggttttctttggactattagtgcgacgtcgttttctgagtgtttcactattttggtttttcgattatttttggaagacattttattctaatcttttaaagacatttatgttgttcggttgtc

SEQ ID NO: 92 - protein, 399 aa, Arabidopsis thaliana
  misc_feature (1)..(399): Ceres CDNA ID no. 12330770
  misc_feature (1)..(399): Also Known As  Ceres SEEDLINE ME01395
  misc_feature (1)..(399): Also Known As  Ceres CLONE ID no. 151087
  misc_feature: Phenotype: Late Flowering Useful for delaying flowering time
  misc_feature: Phenotype: Large Useful for making larger plants
  misc_feature: Phenotype: ROSETTE LEAVES Useful for making ornamental plants with modified leaves
  misc_feature: Phenotype: Long Petioles Useful for making plants that grow better in shade
  misc_feature: Phenotype: Short Petioles Useful for making smaller plants
MATLFNKFQQAVGVLAKSTTFAKNPRQLQFEADVNKLFMYTSYNRLGREAEETDAEEIIEMAGKATLSEQQKQVQENIHYQVEKFCSLMDGILLPDVRRNESGSQSTSPRPPRRSGLTFAIGSNNAFPHADQPLVPETKPLKLNDVSQRLMDQMGYTLETKPSVIPHKDAGQGCFIKGEADVGTVLAFYPGVIYSPAFYKYIPGYPKVDSQNSYLITRYDGTVINAQPWGLGGESREAWNGSYTPAVKANTKTAENGSDRLWKALSKPLEGSGKGKEVLERRNPLAFGHLANHPAKEMTPNVMICPYDFPLMAKDLRPYIPNISFGDSGEIKMKRFGSFWFKTGSKNGLEAPVLKTLVLVATRSLCNEELLLNYRLSNSKRRPDWYTPVNEEEDRRRWS

SEQ ID NO: 93 - protein, 361 aa, Arabidopsis thaliana
  misc_feature (1)..(361): Ceres CLONE ID no. 151087
MYTSYNRLGREAEETDAEEIIEMAGKATLSEQQKQVQENIHYQVEKFCSLMDGILLPDVRRNESGSQSTSPRPPRRSGLTFAIGSNNAFPHADQPLVPETKPLKLADVSQRLMDQMGYTLEIKPSVIPHKDAGQGCFIKGEADVGTVLAFYPGVIYSPAFYRYIPGYPKVDSQNSYLITRYDGTVINAQPWGLGGESREAWNGSYTPAVKTNTKTAENGSDRLWKALSKPLEGSGKGKEVLERRNPLAFGHLANHPAKEMTPNVMICPYDFPLMAKDLRPYIPNISFGDSGEIKMKRFGSFWFKTGSKDGLEAPVLKTLVLVATRSLCNEELLLNYRLSNSKRRPDWYTPVNEEEDRRRWS

SEQ ID NO: 94 - DNA, 1224 bp, Populus balsamifera subsp. trichocarpa
  misc_feature (1)..(1224): Ceres GDNA ANNOT ID no. 1504145
atggcttctctttttaacaaatttcaagagtttgtgaaaactctagccaaaagtcccacatttgctagaaatccaagggagtttcaatttgaaacggacatgaatcgtctctttctttttaccagctacaatcgtttggggaaaaatgctgaggaggcagacgcggaggagatcattgaaatggccagtaaagcttctgttgctgatcagcagaaacaggttcaagaaaatatccactttcaaattacaaacttctgctcagctatgaatgaaattcttcttcccgatttggaaaaaagaagcaagaaggatgaagctcctgcacaatcaaatgctgctcctcggcgtagtggccttagttttgctgttggcaagagtggtccacctattgaccgtcctggtgagtttataacagctatacctgagacgaagcagttaagtcgtagcaaagtatcacagagtttaagggatgaaattggttacacacttgatctcaagccatctctgataccccacaaggaagctggagaaggtttgtttttaagtggtgaggctgatgtgggcactgtgattgccatataccctggtgtcatatacagccctgcttattaccggtatatcccagggtacccaagagttgatgcccagaacccatatttgatcactagatatgatgggactgtgatcaatgccctgccttggggttctgggggtgaaagtcgcgaagtgtgggatggcttaactgtgccagaaatcaggtctaatgtgcaaagtgttgagaaaggtcaagaccgggtctggagaatgctgagtaaacctttggaaggtacacgagttggttctattggtgatgtcttggagcggagaaacccattagcattggctcattttgctaaccacccagcgaagggtatggatccaaatgttatgatttgcccctatgacttcccactgactgagaaggatatgaggacctttataccaaacgtatcttttggaaatcatgaagaagtgaatatgagaagatttggcagtttttggttcaaatctagtgccaaaaatagcgtatctgatgttcctgttctcaagactctggttttagttgccactagggcgctttgtaatgaagaggtgctcctgaactacaggttgagcaacacaaaacgtcgaccagcatggtatagtccggtggatgaagaggaagaccggaggagatggagctaa

SEQ ID NO: 95 - protein, 374 aa, Populus balsamifera subsp. trichocarpa
  misc_feature (1)..(374): Ceres GDNA ANNOT ID no. 1504145
  misc_feature (1)..(374)
  Functional Homolog of CDNA ID no. 12330770at SEQ ID no. 92with e-value of 3.3E-133 and percent identity of 67.40
MNRLFLFTSYNRLGKNAEEADAEEIIEMASKASVADQQKQVQENIHFQITNFCSAMNEILLPDLEKRSKKDEAPAQSNAAPRRSGLSFAVGKSGPPIDRPGEFITAIPETKQLSRSKVSQSLRDEIGYTLDLKPSLIPHKEAGEGLFLSGEADVGTVIAIYPGVIYSPAYYRYIPGYPRVDAQNPYLITRYDGTVINALPWGSGGESREVWDGLTVPEIRSNVQSVEKGQDRVWRMLSKPLEGTRVGSIGDVLERRNPLALAHFANHPAKGMDPNVMICPYDFPLTEKDMRTFIPNVSFGNHEEVNMRRFGSFWFKSSAKNSVSDVPVLKTLVLVATRALCNEEVLLNYRLSNTKRRPAWYSPVDEEEDRRRWS

SEQ ID NO: 96 - protein, 398 aa, Triticum aestivum
  misc_feature (1)..(398): Ceres CLONE ID no. 1005083
  misc_feature (1)..(398)
  Functional Homolog of CDNA ID no. 12330770at SEQ ID no. 92with e-value of 0 and percent identity of 62.85
MAFLFNKFQEAIKTLAKSPSFARDPRHLQFDADVNRLFLYTSYNRLGEHSEEKDAEEIIDLASKASVTDQQKQVQGNVHYQLKHICKSMDNILRPDTKDPSQSSSDAYNNSRRSGLSLAVGTGVAAANKPAVPATRPLTQAELSNKFRDQFGYTLDIKPSLIPHKDAGQGLFLSGEANIGAVLAIYPGVIYSPAYYRYIPGYPRIDACNSYLITRYDGTIINAKPWHLGGETREIWDGSDPVDYNTTPPKSPESNSDRAWRMLNKPLQKSGTENFGDVLERRNPLAFGHFANHPPGGSTPNVMICPYDFPLTEKDMRVYIPNIAFGGEEPVTMKRFGSFWFKSRAPGKETGESPVLRTLVSTRSVCDEELYLNYRYSSKGRPDWYTPVDEEEDKRRWS

SEQ ID NO: 97 - protein, 405 aa, Oryza sativa subsp. japonica
  misc_feature (1)..(405): Public GI no. 50910970
  misc_feature (1)..(405)
  Functional Homolog of CDNA ID no. 12330770at SEQ ID no. 92with e-value of 1.1E-130 and percent identity of 63.61
MGSLFIRFQEAVKTLAKNPMFANNRLFARDPRHLQFEADVNRLFLYTSYYRLGANAEEKDAEEIIDMASKASVSEQQKQVQENVHYQLTNMCQAMDSILLPDTKNGASEANNYPRRSGLSFAVGTGVASANKPDVPSTRPLNRAELSNKFRDHFQYTLDIRPSQIPHKDAGQGLFLSGETNAGAVLAIYPGVVYSPAYYRYIPGYPKIDACNNYLITRYDGTIIDAKPWQLGGDSREIWDGSDLVDYNAVPSKSQESNSDRAWRMLSKPLKKGHTENFGEVLERRNPLAFGHFANHPPKGSTPNVMICPYDFPLTEKDMRVYIPNITFGGEEEPVTMKRFGSFWFKSGRSGNQEGESPVLKTLVLVSTRSICDEELFLNYRYSNSKKRPEWYIPVDEEEDKRRWS

SEQ ID NO: 98 - protein, 319 aa, Zea mays
  misc_feature (1)..(319): Ceres CLONE ID no. 337070
  misc_feature (1)..(319)
  Functional Homolog of CDNA ID no. 12330770at SEQ ID no. 92with e-value of 2E-122 and percent identity of 60.42
MCQAMDSILCPDTINDPSKGPSEAHNHSQRSGLSFAVGGAASANKQSAIIPATRPLTRAELSKKFRDHFGYTLDIGPSGIPHKDAGQGLFLSGQANAGAVLAIYPGVIYSPAYYRYIPGYPRIDVCNNYLITRYDGTIIDAKPWCFGGETRALWDGSDLVDYNAMAPKGSENNSDRVWRMLSKPLEKGVRENFGEVLERRNPLAFGHFANHPPKGSSPNVMICPYDFPLTEKDMRVYIPNITFGGQETIRMKRFGSFYFKSGGSDNQAGDSLVLKTLVLVSTRSICDEELFLNYRYSNSKRRPEWYSPVDEEEDKRRWS

SEQ ID NO: 99 - DNA, 1143 bp, Populus balsamifera subsp. trichocarpa
  misc_feature (1)..(1143): Ceres GDNA ANNOT ID no. 1504146
atggctataaggaaatcacctttccaaaacccacataggtttttcaatcaacgaagcacaagacaataccagacagcaagtgttgtgaaaactctagccaaaagtcccacagatggtacaagtacaaaggaccttaaacgtctctttattttaaccagatctgtaattgcttgttcttttgagtatcttgagtttctaatgagaggtaaagttttcagctgcaatcgtttgggaaggaatgctgataaggctgacgcaaaggatatcattgaaatggccaataaattttatgttgctgaacagcagaaacagatccaagaaaacatccattttcaaattaaaaacttctgcacagctatgaatgatattcttcttcctgatgcgagaaagagaactatacctgagatgaggcggttgagtcatgctgaagtatcacagagtttaaaggatcacattggttacacacttgatgtgaagccatctctgatgccccatgaaaaagctggacaaggtttgctcataaacggtgaggctgatgctggcgctgttattgccatataccccggcatcatacacagtcctgcttattaccagtacatcccagggtacccaagaattcatgcccggaaccggtacttgatcactagacatgatgggacagttatcaatgcacaaccttggggttttggtggtgaaattcgtgaagtgtgggatggcttcacagtgccagaaatcatgcctaatgtgcaaagtactggtaaagatggtccagagctagtctggagggtgttgagtaagcctttggaaggtactggggttggttctattggtgatgtcttggagaggagaaacccattagctttggctcattttgccaaccaggtagcagtgggcatgcatcaaaatgttatggcttgcccttatgacttcccactgaccgagatggatatgaggacctatataccaaatgtatcgtttgcaaatccagaagtgaatattagaagatatggcagtttttggttcagttccaaaagcagtgaatccaatgttcctgttctcaagactctcgtactagtcgctactagggcactctgtgatgaagaagtgctcgtagactacaggttgacaaacatgaagtgttag

SEQ ID NO: 100 - protein, 380 aa, Populus balsamifera subsp. trichocarpa
  misc_feature (1)..(380): Ceres GDNA ANNOT ID no. 1504146
  misc_feature (1)..(380)
  Functional Homolog of CDNA ID no. 12330770at SEQ ID no. 92with e-value of 1.1E-88 and percent identity of 58.55
MAIRKSPFQNPHRFFNQRSTRQYQTASVVKTLAKSPTDGTSTKDLKRLFILTRSVIACSFEYLEFLMRGKVFSCNRLGRNADKADAKDIIEMANKFYVAEQQKQIQENIHFQIKNFCTAMNDILLPDARKRTIPEMRRLSHAEVSQSLKDHIGYTLDVKPSLMPHEKAGQGLLINGEADAGAVIAIYPGIIHSPAYYQYIPGYPRIHARNRYLITRHDGTVINAQPWGFGGEIREVWDGFTVPEIMPNVQSTGKDGPELVWRVLSKPLEGTGVGSIGDVLERRNPLALAHFANQVAVGMHQNVMACPYDFPLTEMDMRTYIPNVSFANPEVNIRRYGSFWFSSKSSESNVPVLKTLVLVATRALCDEEVLVDYRLTNMKC

SEQ ID NO: 101 - DNA, 1636 bp, Arabidopsis thaliana
  misc_feature (1)..(1636): Ceres CDNA ID no. 23363031
  misc_feature (1)..(1636): Also Known As  Ceres SEEDLINE ME01543
atatacccctcaatcataaacaataaacagagggagtcgccaaattttctcatcattttctcgagaaaatagactaaaagcgattcccgagagaaagaaagaacaaaaaaaaaacatccgagtgaaaatgagagaaattcttcatattcaaggaggtcagtgcggaaaccagatcggagctaagttctgggaagttatttgcggcgagcacggtattgatcaaaccggtcagtcatgtggcgatacagatctacagcttgaaaggatcaatgtctattttaacgaagctagcggaggcaaatacgttcctcgtgctgttcttatggatctggagcctggaactatggattctctcagatctgggccgtttggtcagattttccggcctgataacttcgtttttggtcagtctggtgctgggaataactgggcgaaaggtcattacacggagggagctgagttgattgattctgtgcttgatgttgtgaggaaggaagctgagaactgtgattgtcttcaaggttttcaagtttgtcattctttgggaggaggaactggttctggcatgggaacacttcttatttctaagattagagaggaatatccagatcgtatgatgatgaccttttcggttttcccatctcctaaggtctctgatacagttgttgagccatacaatgctactctttccgttcaccagctcgttgagaatgctgatgaatgtatggttttggataacgaagctctttacgatatctgtttccgtaccttgaagcttgctaatcctacatttggtgaccttaaccatctcatctcagctacaatgagtggtgttacatgctgtcttcggttccctggtcaactaaactctgaccttagaaaacttgcagtgaaccttattcctttcccacgactccacttcttcatggttggttttgcacctttgacatcaagaggatctcaacaatacagtgccttgagtgtccctgagctaactcaacagatgtgggatgccaaaaacatgatgtgtgcagctgatcctcgtcatggtcgttacttgacagcttctgctgtcttccgtggaaagatgagtaccaaagaggttgatgaacagatgatgaacgtccagaacaaaaactcctcatactttgttgaatggattccaaataacgtgaaatcaagcgtctgcgatatagctcccactggtttgaaaatggcatcaactttcattggaaactcaacttcaatccaggaaatgttcaggcgtgtgagtgaacagttcactgccatgttcaggagaaaggctttccttcattggtacacaggagaaggaatggacgagatggagttcactgaagcagagagtaacatgaatgatcttgttgcagagtatcagcaatatcaagatgctacagtcggtgaagaggagtacgaggaggacgaagaagaagaagaagcctaaagaaaagatgattgattattacttttgtaaggctgtaagttcgtcgcactcatttccttttacctctttttctgaattgggattctctctttttgtgctttgtgtgttttgttattgaatttctttcccaaacctaagatttgttccagagtgtaatcacatttgcctatgctc

SEQ ID NO: 102 - protein, 444 aa, Arabidopsis thaliana
  misc_feature (1)..(444): Ceres CDNA ID no. 23363031
  misc_feature (1)..(444): Also Known As  Ceres SEEDLINE ME01543
  misc_feature (246)..(383): Pfam Name: Tubulin_C Pfam Description: Tubulin/FtsZ family, C-terminal domain
  misc_feature (45)..(244): Pfam Name: Tubulin Pfam Description: Tubulin/FtsZ family, GTPase domain
  misc_feature: Phenotype: Late Flowering Useful for delaying flowering time
MREILHIQGGQCGNQIGAKFWEVICGEHGIDQTGQSCGDTDLQLERINVYFNEASGGKYVPRAVLMDLEPGTMDSLRSGPFGQIFRPDNFVFGQSGAGNNWAKGHYTEGAELIDSVLDVVRKEAENCDCLQGFQVCHSLGGGTGSGMGTLLISKIREEYPDRMMMTFSVFPSPKVSDTVVEPYNATLSVHQLVENADECMVLDNEALYDICFRTLKLANPTFGDLNHLISATMSGVTCCLRFPGQLNSDLRKLAVNLIPFPRLHFFMVGFAPLTSRGSQQYSALSVPELTQQMWDAKNMMCAADPRHGRYLTASAVFRGKMSTKEVDEQMMNVQNKNSSYFVEWIPNNVKSSVCDIAPTGLKMASTFIGNSTSIQEMFRRVSEQFTAMFRRKAFLHWYTGEGMDEMEFTEAESNMNDLVAEYQQYQDATVGEEEYEEDEEEEEA

SEQ ID NO: 103 - DNA, 1338 bp, Populus balsamifera subsp. trichocarpa
  misc_feature (1)..(1338): Ceres GDNA ANNOT ID no. 1480518
atgagagaaatccttcacattcaagggggtcaatgtgggaatcaaattggggccaagttttgggaggtgatctgtgatgaacatgggattgatcagtcagggaggtacagtggagactcagatcttcaattggagaggattaatgtgtattacaatgaagcaagtggtggaagatatgtgccacgtgctgttcttatggatcttgaacctggtaccatggattcagtcagatctggtccttttggacagatttttaggcctgataacttcgtttttggccaatccggtgctggtaataactgggctaaagggcattacactgaaggagctgaattgattgattctgttcttgatgttgtcaggaaagaagctgaaaattgtgattgcttgcaaggatttcaagtttgccattctttgggtggaggcactggttctggcatgggaactcttcttatttctaaaattcgtgaggagtatcctgatcgcatgatgttgacattttccgtcttcccttcacctaaggtatctgacactgttgttgaaccatacaatgcaactctttctgtccaccagcttgtagaaaacgctgatgaatgcatggttttggacaatgaagctttgtatgacatctgcttccgcactctcaagcttgctacccccacttttggggatcttaaccatctcatttctgccaccatgagcggtgtcacatgctgccttcgcttcccaggacagctgaactctgacctacgaaagcttgcagttaaccttatcccattccctcgtcttcatttcttcatggttggatttgcacccttgacatcaagaggatcacagcaataccgtgctctgactgtgcctgaactaacccagcaaatgtgggatgccaagaacatgatgtgtgctgccgacccacgtcatggccgttatctaactgcttcagccatgttccgtggtaagatgagcactaaagaggtcgatgaacaaatgataaatgtccagaacaagaactcgtcatactttgttgagtggattcccaacaatgtaaagtccagtgtatgtgacatcccaccaaagggtctgaagatggcatccactttcatagggaattcaacttcaatccaggagatgttcaggcgtgtcagtgaacaattcacagctatgttcaggcgcaaggctttcttgcactggtacactggcgagggaatggacgagatggaatttaccgaggctgagagtaacatgaacgatctggttgctgagtatcagcaataccaggatgcaactatcgatgaagaggagtacgaggaggaagaggaagaggaacatgatacttaa

SEQ ID NO: 104 - protein, 380 aa, Populus balsamifera subsp. trichocarpa
  misc_feature (1)..(380): Ceres GDNA ANNOT ID no. 1480518
  misc_feature (1)..(380)
  Functional Homolog of CDNA ID no. 23363031at SEQ ID no. 102with e-value of 1.2E-199 and percent identity of 96.82
MDLEPGTMDSVRSGPFGQIFRPDNFVFGQSGAGNNWAKGHYTEGAELIDSVLDVVRKEAENCDCLQGFQVCHSLGGGTGSGMGTLLISKIREEYPDRMMLTFSVFPSPKVSDTVVEPYNATLSVHQLVENADECMVLDNEALYDICFRTLKLATPTFGDLNHLISATMSGVTCCLRFPGQLNSDLRKLAVNLIPFPRLHFFMVGFAPLTSRGSQQYRALTVPELTQQMWDAKNMMCAADPRHGRYLTASAMFRGKMSTKEVDEQMINVQNKNSSYFVEWIPNNVKSSVCDIPPKGLKMASTFIGNSTSIQEMFRRVSEQFTAMFRRKAFLHWYTGEGMDEMEFTEAESNMNDLVAEYQQYQDATIDEEEYEEEEEEEHDT

SEQ ID NO: 105 - protein, 408 aa, Brassica napus
  misc_feature (1)..(408): Ceres CLONE ID no. 1039306
  misc_feature (1)..(408)
  Functional Homolog of CDNA ID no. 23363031at SEQ ID no. 102with e-value of 0 and percent identity of 96.57
  misc_feature (11)..(11): Xaa is any aa, unknown, or other
MREILHIQGGXCGNQIGAKFWEVICGEHGIDHTGQYVGDSPLQLERIDVYFNEASGGKYVPRAVLMDLEPGTMDSLRSGPYGQIFRPDNFVFGQSGAGNNWAKGHYTEGAELIDSVLDVVRKEAENSDCLQGFQVCHSLGGGTGSGMGTLLISKIREEYPDRMMMTFSVFPSPKVSDTVVEPYNATLSVHQLVENADECMVLDNEALYDICFRTLKLSNPSFGDLNHLISATMSGVTCCLRFPGQLNSDLRKLAVNLIPFPRLHFFMVGFAPLTSRGSQQYSALSVPELTQQMWDAKNMMCAADPRHGRYLTASAVFRGKLSTKEVDEQMMNIQNKNSSYFVEWIPNNVKSSVCDIAPKGLKMASTFIGNSTSIQEMFRRVSEQFTAMFRRKAFLHWYTGEGMDEMEF

SEQ ID NO: 106 - protein, 381 aa, Glycine max
  misc_feature (1)..(381): Ceres CLONE ID no. 581299
  misc_feature (1)..(381)
  Functional Homolog of CDNA ID no. 23363031at SEQ ID no. 102with e-value of 1.5E-199 and percent identity of 96.56
MDLEPGTMDSVRSGPYGQIFRPDNFVFGQSGAGNNWAKGHYTEGAELIDSVLDVVRKEAENCDCLQGFQVCHSLGGGTGSGMGTLLISKIREEYPDRMMLTFSVFPSPKVSDTVVEPYNATLSVHQLVENADECMVLDNEALYDICFRTLKLATPTFGDLNHLISATMSGVTCCLRFPGQLNSDLRKLAVNLIPFPRLHFFMVGFAPLTSRGSQQYRALTVPELTQQMWDAKNMMCAADPRHGRYLTASAMFRGKMSTKEVDEQMINVQNKNSSYFVEWIPNNVKSSVCDIPPKGLKMASTFIGNSTSIQEMFRRVSEQFTAMFRRKAFLHWYTGEGMDEMEFTEAESNMNDLVAEYQQYQDATADEEEYEEEEEEEEIGA

SEQ ID NO: 107 - DNA, 560 bp, Arabidopsis thaliana
  misc_feature (1)..(560): Ceres CDNA ID no. 24380118
  misc_feature (1)..(560): Also Known As  Ceres SEEDLINE ME01671
  misc_feature (1)..(560): Also Known As  Ceres CLONE ID no. 1986
aacaaaaagattaaacaaagagagaagaatatggcgagagggaagatccagatcaagaggatagagaaccagacaaacagacaagtgacgtattcaaagagaagaaatggtttattcaagaaagcacatgagctcacggttttgtgtgatgctagggtttcgattatcatgttctctagctccaacaagcttcatggctttgtagtgtctgatttctacgacaaatacccaaagttcttggagttggtgcttccgcgcattaaagaagggaagataacgtatgtgraagatgtagctgatgggctcgagaaagctcctgaagctcttgtggggcttttccatggtaagaacgttgggaaacaagttgttgttattgctcgtgagtgaagaatacttatttgggagtaatgtcttattgcgcgtgagtgaagaatacttatttgggagaaatgttatatttatccaacaagagttggtatgtctgttgaacccaaccgtgagtttttggtttatgaataataataattatagtaatatacagtaagattaatttgtttgtt

SEQ ID NO: 108 - protein, 118 aa, Arabidopsis thaliana
  misc_feature (1)..(118): Ceres CDNA ID no. 24380118
  misc_feature (1)..(118): Also Known As  Ceres SEEDLINE ME01671
  misc_feature (1)..(118): Also Known As  Ceres CLONE ID no. 1986
  misc_feature (9)..(59): Pfam Name: SRF-TF Pfam Description: SRF-type transcription factor (DNA-binding and dimerisation domain)
  misc_feature: Phenotype: Reduced fertility Useful for sterility, genetic confinement systems
  misc_feature (86)..(86): Xaa is any aa, unknown, or other
MARGKIQIKRIENQTNRQVTYSKRRNGLFKKAHELTVLCDARVSIIMFSSSNKLHGFVVSDFYDKYPKFLELVLPRIKEGKITYVXDVADGLEKAPEALVGLFHGKNVGKQVVVIARE

SEQ ID NO: 109 - DNA, 588 bp, Arabidopsis thaliana
  misc_feature (1)..(588): Ceres CDNA ID no. 12420510
  misc_feature (1)..(588): Also Known As  Ceres SEEDLINE ME01990
  misc_feature (1)..(588): Also Known As  Ceres CLONE ID no. 258241
aaatcttctttcctcaatatcacccagaagaaagagaaagtgaaacagatcaagaaagagattgagaaaaatgtgtagaggcttgaataatgaagagagcagaagaagtgacggaggaggttgccggagtctctgcacgagaccgagtgttccggtaaggtgtgagctttgcgacggagacgcctccgtgttctgtgaagcggactcggcgttcctctgtagaaaatgtgaccggtgggttcatggagcgaattttctagcttggagacacgtaaggcgcgtgctatgcacttcttgtcagaaactcacgcgccggtgcctcgtcggagatcatgacttccacgttgttttaccgtcggtgacgacggtcggagaaaccaccgtggagaatagaagtgaacaagataatcatgaggttccgtttgtttttctctgattattagatttttttggtgtaagctataaatattctagggtttttatgcaattttcttttaagaaaaatctgaaaattttaattttatgaagcttagaattttaagaaatgtgtaatgaaaaaaaaaaaagaattttaagaaatgggtagtg

SEQ ID NO: 110 - protein, 121 aa, Arabidopsis thaliana
  misc_feature (1)..(121): Ceres CDNA ID no. 12420510
  misc_feature (1)..(121): Also Known As  Ceres SEEDLINE ME01990
  misc_feature (28)..(72): Pfam Name: zf-B_box Pfam Description: B-box zinc finger
  misc_feature: Phenotype: Large Useful for making larger plants
  misc_feature: Phenotype: Plant Size Useful for making plants with increased size and biomass
MCRGLNNEESRRSDGGGCRSLCTRPSVPVRCELCDGDASVFCEADSAFLCRKCDRWVHGANFLAWRHVRRVLCTSCQKLTRRCLVGDHDFHVVLPSVTTVGETTVENRSEQDNHEVPFVFL

SEQ ID NO: 111 - DNA, 1494 bp, Arabidopsis thaliana
  misc_feature (1)..(1494): Ceres CDNA ID no. 7090414
  misc_feature (1)..(1494): Also Known As  Ceres SEEDLINE ME03787
ggcttgacatgacaaatgtacaactgggagagaaagtcagtccgattgtgttggggatgacgatggcaaaagtagtaaataaggaagaaacaggaggggcgttttcgggagaagaaggaggaatatgagtgtgagttgttgttgtaggaatctgggcaagacaataaaaaaggcaataccttcacatcatttgcatctgagaagtcttggtgggagtctctatcgtcgtcgtatccaaagctcttcaatggagaccgatctcaagtcaacctttctcaacgtttattctgttctcaagtctgaccttcttcatgacccttccttcgaattcaccaatgaatctcgtctctgggttgatcggatgctggactacaatgtacgtggagggaaactcaatcggggtctctctgttgttgacagtttcaaacttttgaagcaaggcaatgatttgactgagcaagaggttttcctctcttgtgctctcggttggtgcattgaatggctccaagcttatttccttgtgcttgatgatattatggataactctgtcactcgccgtggtcaaccttgctggttcagagttcctcaggttggtatggttgccatcaatgatgggattctacttcgcaatcacatccacaggattctcaaaaagcatttccgtgataagccttactatgttgaccttgttgatttgtttaatgaggttgagttgcaaacagcttgtggccagatgatagatttgatcaccacctttgaaggagaaaaggatttggccaagtactcattgtcaatccaccgtcgtattgtccagtacaaaacggcttattactcattttatctccctgttgcttgtgcgttgcttatggccggcgaaaatttggaaaaccatattgatgtgaagaatgttcttgttgacatgggaatctacttccaagtgcaggatgattatctggattgttttgctgatcccgagacgcttggcaagataggaacagatatagaagatttcaaatgctcgtggttggtggttaaggcattagagcgctgcagcgaagaacaaactaagatattatatgagaactatggtaaacccgacccatcgaacgttgctaaagtgaaggatctctacaaagagctggatcttgagggagttttcatggagtatgagagcaaaagctacgagaagctgactggagcgattgagggacaccaaagtaaagcaatccaagcagtgctaaaatccttcttggctaagatctacaagaggcagaagtagtagagacagacaaacataagtctcagccctcaaaaatttcctgttatgtctttgattcttggttggtgatttgtgtaattctgttaagtgctctgattttcagggggaataataaacctgcctcactytgtattcttgtgttacaattgtatttgtttcatgactatgatcttcttcttkcatcagttatatgaatttgagattcttgttggttg

SEQ ID NO: 112 - protein, 384 aa, Arabidopsis thaliana
  misc_feature (1)..(384): Ceres CDNA ID no. 7090414
  misc_feature (1)..(384): Also Known As  Ceres SEEDLINE ME03787
  misc_feature (76)..(347): Pfam Name: polyprenyl_synt Pfam Description: Polyprenyl synthetase
  misc_feature: Phenotype: Late Flowering Useful for delaying flowering time
  misc_feature: Phenotype: Dark Green Useful for increasing chlorophyll and photosynthetic capacity
  misc_feature: Phenotype: High Anthocyanin Useful for increasing increasing anthocyanin content
  misc_feature: Phenotype: Interveinal Chlorosis Useful for making ornamental plants with modified color
MSVSCCCRNLGKTIKKAIPSHHLHLRSLGGSLYRRRIQSSSMETDLKSTFLNVYSVLKSDLLHDPSFEFTNESRLWVDRMLDYNVRGGKLNRGLSVVDSFKLLKQGNDLTEQEVFLSCALGWCIEWLQAYFLVLDDIMDNSVTRRGQPCWFRVPQVGMVAINDGILLRNHIHRILKKHFRDKPYYVDLVDLFNEVELQTACGQMIDLITTFEGEKDLAKYSLSIHRRIVQYKTAYYSFYLPVACALLMAGENLENHIDVKNVLVDMGIYFQVQDDYLDCFADPETLGKIGTDIEDFKCSWLVVKALERCSEEQTKILYENYGKPDPSNVAKVKDLYKELDLEGVFMEYESKSYEKLTGAIEGHQSKAIQAVLKSFLAKIYKRQK

SEQ ID NO: 113 - protein, 342 aa, Arabidopsis thaliana
  misc_feature (1)..(342): Public GI no. 21436457
  misc_feature (1)..(342)
  Functional Homolog of CDNA ID no. 7090414at SEQ ID no. 112with e-value of 1.1E-167 and percent identity of 90.88
MADLKSTFLDVYSVLKSDLLQDPSFEFTHESRQWLERMLDYNVRGGKLNRGLSVVDSYKLLKQGQDLTEKETFLSCALGWCIEWLQAYFLVLDDIMDNSVTRRGQPCWFRKPKVGMIAINDGILLRNHIHRILKKHFREMPYYVDLVDLFNEVEFQTACGQMIDLITTFDGEKDLSKYSLQIHRRIVEYKTAYYSFYLPVACALLMAGENLENHTDVKTVLVDMGIYFQVQDDYLDCFADPETLGKIGTDIEDFKCSWLVVKALERCSEEQTKILYENYGKAEPSNVAKVKALYKELDLEGAFMEYEKESYEKLTKLIEAHQSKAIQAVLKSFLAKIYKRQK

SEQ ID NO: 114 - protein, 342 aa, Lupinus albus
  misc_feature (1)..(342): Public GI no. 1346028
  misc_feature (1)..(342)
  Functional Homolog of CDNA ID no. 7090414at SEQ ID no. 112with e-value of 4.4E-153 and percent identity of 81.18
MADLRSTFLNVYSVLKSELLHDPAFEFSPDSRQWLDRMLDYNVPGGKLNRGLSVIDSYRLLKDGHELNDDEIFLASALGWCIEWLQAYFLVLDDIMDNSHTRRGQPCWFRVPKVGMIAANDGVLLRNHIPRILKKHFRGKPYYADLLDLFNEVEFQTASGQMIDLITTLEGEKDLSKYTLSLHRRIVQYKTAYYSFYLPVACALLMVGENLDNHIDVKNILVDMGTYFQVQDDYLDCFGAPETIGKIGTDIEDFKCSWLVVKALELSNDEQKKVLYDNYGKPDPANVAKVKALYDELNLQGVFTEYESKSYEKLVTSIEAHPSKAVQALLKSFLGKIYKRQK

SEQ ID NO: 115 - protein, 342 aa, Malus x domestica
  misc_feature (1)..(342): Public GI no. 20135548
  misc_feature (1)..(342)
  Functional Homolog of CDNA ID no. 7090414at SEQ ID no. 112with e-value of 4.4E-153 and percent identity of 81.18
MADLKSKFLKVYSVLKSELLEDPAFDFTNDSRQWVERMLDYNVPGGKLNRGLSVIDSYQLLQQGRELTEDEIFLASALGWCIEWLQAFFLVLDDIMDGSHTRRGQPCWFRLPKVGMIAVNDGVVLRNHIPRILRKYFREKPYYVDLLDLFNEVEFQTASGQMIDLITTIEGEKDLSKYSLSIHRRIVQYKTAYYSFYLSVACALLMSGEELEKHIDVKNILVEMGIYFQVQDDYLDCFGDPETIGKIGTDIEDFKCSWLVVKALELCNEEQKKVLHENYGKPDPENVATVKALYKELDIEGVFADYESKSYKKLTSWIEGHPSKAVQSVLKSFLGKIYKRQK

SEQ ID NO: 116 - protein, 342 aa, Hevea brasiliensis
  misc_feature (1)..(342): Public GI no. 34013692
  misc_feature (1)..(342)
  Functional Homolog of CDNA ID no. 7090414at SEQ ID no. 112with e-value of 1.8E-149 and percent identity of 80.29
MADLKSTFLKVYSVLKQELLEDPAFEWTPDSRQWVERMLDYNVPGGKLNRGLSVIDSYKLLKEGQELTEEEIFLASALGWCIEWLQAYFLVLDDIMDSSHTRRGQPCWFRVPKVGLIAANDGILLRNHIPRILKKHFRGKAYYVDLLDLFNEVEFQTASGQMIDLITTLEGEKDLSKYTLSLHRRIVQYKTAYYSFYLPVACALLIAGENLDNHIVVKDILVQMGIYFQVQDDYLDCFGDPETIGKIGTDIEDFKCSWLVVKALELCNEEQKKVLYEHYGKADPASVAKVKVLYNELKLQGVFTEYENESYKKLVTSIEAHPSKPVQAVLKSFLAKIYKRQK

SEQ ID NO: 117 - protein, 342 aa, Lupinus albus
  misc_feature (1)..(342): Public GI no. 1346029
  misc_feature (1)..(342)
  Functional Homolog of CDNA ID no. 7090414at SEQ ID no. 112with e-value of 1.5E-150 and percent identity of 80.00
MADPKSSFLNVYSILKSELLQDPAFEFSTDSRQWVERMLDYNVPGGKLNRGLSVIDSYKLLKDGQELNDEEIFLASALGWCIEWLQAYFLVLDDIMDNSHTRRGHPCWFRVPKVGMIAPNDGVVLRNHIPRILKKHFRGKPYYVDLLDLFNEVEFQTASGQMIDLITTLEGEKDLSKYTLSLHRRIVQYKTAYYSFYLPVACALLMVGENLDNHTDVKNILVEMGTYFQVQDDYLDCFGAPETIGKIGTDIEDFKCSWLVVKALELSNEEQKKVLYENYGKPDPANVAKVKTLYNELNLEGAYADYESKSYEKLVTCIEGHPSKAVQGVLKSFWAKIYKRQK

SEQ ID NO: 118 - protein, 341 aa, Vitis vinifera
  misc_feature (1)..(341): Public GI no. 62199628
  misc_feature (1)..(341)
  Functional Homolog of CDNA ID no. 7090414at SEQ ID no. 112with e-value of 3.8E-147 and percent identity of 79.41
MSETKSKFLEVYSVLKSELLNDPAFEFTDDSRQWVERMLDYNVPGGKLNRGLSVVDSYKLLQGRQLTDDEVFLACVLGLCIEWLQAYFLVLDDIMDNSHTRRGQPCWFRVPKVGMIAANDGVILRNQIPRILKNHFKGKPYYVDLLDLFNEVEFQTASGQMIDLITTIEGEKDLSKYSLPLHRRIVQYKTAYYSFHLPVACALLMAGENLDNHTSVKDILVQMGIYFQVQDDYLDCFGDPQVIGKIGTDIEDFKCSWLIVKALEICNEEQKKTLYGNYGKADPANVAKVKALYKDLDLQGVFLEYESKSYETLVSSIEAHPSKAVQAVLKSFLGKIYKRQK

SEQ ID NO: 119 - DNA, 1614 bp, Arabidopsis thaliana
  misc_feature (1)..(1614): Ceres CDNA ID no. 12676463
  misc_feature (1)..(1614): Also Known As  Ceres SEEDLINE ME04012
aaacactttcatacatgagcaatattcaagaaatggagatgatattgatggtctctttgtgcttaacgaccctcattacccttttcttgcttaaacaattcctcaaacgaaccgccaacaaagtgaacttaccaccatctccatggaggcttccgttgattggtaacctccaccagcttagcctccaccctcaccgttccctccattccctaagccttcggtacggaccactcatgctccttcattttggccgtgtccccatactcgtagtatcctccggggaagcagctcaagaggtattgaaaacacacgatcttaagtttgccaaccgcccgagatcaaaagccgttcatgggcttatgaatggggggcgtgatgtggtgtttggtccctatggagaatattggagacagatgaagagtgtatgcattctcaatctgctcacgaacaaaatggttgcgtcctttgagaagataagagaagaagagctaaatgaaatgatcaagaagctggagaaagcaagttcttcttcttcgtcagaaaatctgagcgaactctttgttactctcccaagcgatgttacgagtagaattgccttgggaagaaaacatagtgaggacgaaaccgcaagggatctcaagaagcgagtgaggcagatcatggagcttttaggcgagttcccaatcggggactatgtcccggctttggcatggatagacaggatcaacggtttcaatgctagaataaaggaagtaagtcaagggtttagcgatcttatggacaaagtggtgcaagaacatttagaggcaggtaatcataaagaggactttgtcgatatactgttatcaatcgaaagcgagaagagtattggattccaagctcaaagagacgacatcaaattcatgatattggatatgtttataggagggacgtcaacaagttcaactctactagaatggataatgacggagctgatcagaaatccaaatgttatgaagaaactccaagacgagattcggtcaaccattaggccacatggttcatacataaaagaaaaagatgttgaaaatatgaaatacttgaaagccgtgattaaagaggtgtttcgggtgcatcctcctcttccactaatacttcccagattattaagtgaagatgtcaaagtaaagggatataacatagccgcaggaaccgaggtgataatcaatgcttgggccatccaaagagaccccgcgatatggggaccggatgcagaagaattcaaaccagaaagacatttagattcaactttggattatcatggaaaagatttaaacttcatcccattcggatcagggagaaggatttgtccagggataaatcttgctttgggtttggtagaggtgacagtggccaaccttgtaggccgatttgactggagggccgaggctggaccaaatggggatcaacctgatctaactgaagcttttggtctcgatgtttgccgaaagttccctctcattgcatttccatcttccgttatttaaaatgtttctctttttatcttttaccttgttatgcacttaattaataagaagcattgtaagatataataaaatccttcattttagaaaa

SEQ ID NO: 120 - protein, 503 aa, Arabidopsis thaliana
  misc_feature (1)..(503): Ceres CDNA ID no. 12676463
  misc_feature (1)..(503): Also Known As  Ceres SEEDLINE ME04012
  misc_feature (40)..(498): Pfam Name: p450 Pfam Description: Cytochrome P450
  misc_feature: Phenotype: Dark Green Useful for increasing chlorophyll and photosynthetic capacity
MSNIQEMEMILMVSLCLTTLITLFLLKQFLKRTANKVNLPPSPWRLPLIGNLHQLSLHPHRSLHSLSLRYGPLMLLHFGRVPILVVSSGEAAQEVLKTHDLKFANRPRSKAVHGLMNGGRDVVFGPYGEYWRQMKSVCILNLLTNKMVASFEKIREEELNEMIKKLEKASSSSSSENLSELFVTLPSDVTSRIALGRKHSEDETARDLKKRVRQIMELLGEFPIGDYVPALAWIDRINGFNARIKEVSQGFSDLMDKVVQEHLEAGNHKEDFVDILLSIESEKSIGFQAQRDDIKFMILDMFIGGTSTSSTLLEWIMTELIRNPNVMKKLQDEIRSTIRPHGSYIKEKDVENMKYLKAVIKEVFRVHPPLPLILPRLLSEDVKVKGYNIAAGTEVIINAWAIQRDPAIWGPDAEEFKPERHLDSTLDYHGKDLNFIPFGSGRRICPGINLALGLVEVTVANLVGRFDWRAEAGPNGDQPDLTEAFGLDVCRKFPLIAFPSSVI

SEQ ID NO: 121 - protein, 113 aa, Teucrium chamaedrys
  misc_feature (1)..(113): Public GI no. 58397752
  misc_feature (1)..(113)
  Functional Homolog of CDNA ID no. 12676463at SEQ ID no. 120with e-value of 8.5E-28 and percent identity of 51.33
LRHPTIMEKLQKEVRGILKDKHEISDDHMEKMQYLKAVIKETLRLHPPVPMLVPRVSTRDVKIKGYDVSVGTRVMINAWAIGRDPVSWDDPEKFKPERFLNSSRDFKGLDFEF

SEQ ID NO: 122 - protein, 509 aa, Nepeta racemosa
  misc_feature (1)..(509): Public GI no. 3582021
  misc_feature (1)..(509)
  Functional Homolog of CDNA ID no. 12676463at SEQ ID no. 120with e-value of 2.7E-113 and percent identity of 46.31
MVSLSYFLIALLCTLPFLLFLNKWRRSYSGKTPPPSPPKLPVIGNLHQLGLYPHRYLQSLSRRYGPLMQLHFGSVPVLVASSPEAAREIMKNQDIVFSNRPKMSIANRLFFNNRDVAFTQYGEYWRQIRSICVLQLLSNKRVQSFRRVREEETSIMVEKIMQLGSSSSTPVNLSELLLSLTNDVVCRVTLGKKYGGGNGSEEVDKLKEMLTEIQNLMGISPVWEFIPWLNWTRRFDGVDQRVDRIVKAFDGFLESVIQEHKERDGDKDGDGDGALDFVDILLQFQRENKNRSPVEDDTVKALILDMFVAGTDTTATALEWAVAELIKNPRAMKRLQNEVREVAGSKAEIEEEDLEKMPYLKASIKESLRLHVPVVLLVPRESTRDTNVLGYDIASGTRVLINAWAIARDPSVWENPEEFLPERFLDSSIDYKGLHFELLPFGAGRRGCPGATFAVAIDELALAKLVHKFDFGLPNGARMEELDMSETSGMTVHKKSPLLLLPIPHHAAP

SEQ ID NO: 123 - protein, 494 aa, Ammi majus
  misc_feature (1)..(494): Public GI no. 46947673
  misc_feature (1)..(494)
  Functional Homolog of CDNA ID no. 12676463at SEQ ID no. 120with e-value of 8.5E-103 and percent identity of 46.04
MKMLEQNPQYLYFFSLFLVTIFLYKWLTLKKTPLKNLPPSPPQYPIIGNLHQIGPDPQASLRDLAQKYGPLMFLKFGTVPVLVVSSADAAREALKTHDLVFADRPYSSVANKIFYNGKDMVFARYTEYWRQVKSICVTQLLSNKRVNSFHYVREEEVDLLVQNLENSHSKVANLTELLIEVTGNVVCRVSVGSGDKVDSYKILILEIMDMLGYSRSIEDFFPLLGWVDWLTGLRGKVAEAAKGVDTFLEGVLKEHLSTTGSKYNDFVSILLEIQEADAGSSMDNECIKSLIWDMLGAGTETISTALEWTLAALIKNPDAMFKLQNEVREIGKGKSKISEADLVKMNYLQAVMKESMRLYFTAPLLVPREARQDIKFMGYDISSGTQVLINAWAIARDPLLWDKPEEFRPERFLNSPIDYKGFHYEFLPFGAGRRGCPGIQFAMCINELVVANLVHKFNFELPDGKRLEDLDMTAASGITLRKKSPLLVVARPHV

SEQ ID NO: 124 - protein, 471 aa, Persea americana
  misc_feature (1)..(471): Public GI no. 117188
  misc_feature (1)..(471)
  Functional Homolog of CDNA ID no. 12676463at SEQ ID no. 120with e-value of 2.3E-107 and percent identity of 45.95
MAILVSLLFLAIALTFFLLKLNEKREKKPNLPPSPPNLPIIGNLHQLGNLPHRSLRSLANELGPLILLHLGHIPTLIVSTAEIAEEILKTHDLIFASRPSTTAARRIFYDCTDVAFSPYGEYWRQVRKICVLELLSIKRVNSYRSIREEEVGLMMERISQSCSTGEAVNLSELLLLLSSGTITRVAFGKKYEGEEERKNKFADLATELTTLMGAFFVGDYFPSFAWVDVLTGMDARLKRNHGELDAFVDHVIDDHLLSRKANGSDGVEQKDLVDVLLHLQKDSSLGVHLNRNNLKAVILDMFSGGTDTTAVTLEWAMAELIKHPDVMEKAQQEVRRVVGKKAKVEEEDLHQLHYLKLIIKETLRLHPVAPLLVPRESTRDVVIRGYHIPAKTRVFINAWAIGRDPKSWENAEEFLPERFVNNSVDFKGQDFQLIPFGAGRRGCPGIAFGISSVEISLANLLYWFNWELPGI

SEQ ID NO: 125 - protein, 529 aa, Oryza sativa subsp. japonica
  misc_feature (1)..(529): Public GI no. 34904242
  misc_feature (1)..(529)
  Functional Homolog of CDNA ID no. 12676463at SEQ ID no. 120with e-value of 2.1E-99 and percent identity of 45.58
MAVSLVVVVVVVIAIVVPLLYLVLLPAWKPARRDDGDGGMRRRLPPSPPWGLPLLGHLHLLGALPHRALRSLAAAHGPVLLLRLGRVPVVVVSSAAAAEEVMRTRDLEFASRPRVAMAERLLYGGRDVAFAPYGEYWRQTRRICVVHLLSARRVLSFRRVREEEAAALVARVRAAGGAVDLVEHLTAYSNTVVSRAVFGDESARGLYGDVDRGRVLRKLFDDFVELLGQEPMGELLPWLGWVDALNGMEVKVQRTFEALDGILEKVIDDHRRRRREVGRQMDDGGGGDHRDFVDVLLDVNETDMDAGVQLGTIEIKAIILDMFAAGTDTTTTVIEWAMAELITHPDAMRNAQDEIKAVVGITSHITEDHLDRLPYLKAVLKETLRLHPPLPLLVPHEPSSDTKILGYSIPACTRIVINAWTIGRDQATWGEHAEEFIPERFLESGLDYIGQDFVLVPFGAGRRGCPGVGFAVQAMEMALASLLYNFDWETRVVDRRSEFGTSSLDMSEMNGLSVRLKYGLPLIAISRFP

SEQ ID NO: 126 - protein, 482 aa, Triticum aestivum
  misc_feature (1)..(482): Ceres CLONE ID no. 921721
  misc_feature (1)..(482)
  Functional Homolog of CDNA ID no. 12676463at SEQ ID no. 120with e-value of 4.7E-102 and percent identity of 45.25
MEGRRHLPPSPRGLPLLGHLHLLGSLPHRALRSLAAAHGPVLLLRLGRVPAVVVSSPAAAEEVMRARDLAFASRPRSAMADRLLYGRDVAFAPYGEYWRQARRVCVVHLLSPLRILSFRGVREEEAAALVERVRGAAAGGAAVDLCELLVAYANTVVSRAAFGDDSARGLYEEGNKERELRKVFNDFQELLGTAPLGELLPWLGWLDAVRGMEGKIRRTFKALDGVLEKVIGDHRRRRQAGQQTGDDGGDHRDFVDVLLDVSDTDDEAGMRLSTTEIKAIILDMFAAGTDTTSTAMEWAMAEVITHPDSMRKLQDELRAAVGGSGHVITEDHIDKLHYLKAVVKETLRLHPPIPLLVPREPQDDAEILGHHVPAGTRVVINAWAVGRDPAAWERAEEFVPERFLDGAVDYKGQDFQLIPFGAGRRGCPGVGFAAATVEMALASLMYHFDWEPAGASLDMREVNGLAVHLKSGLPLVAKLRFR

SEQ ID NO: 127 - protein, 515 aa, Triticum aestivum
  misc_feature (1)..(515): Ceres CLONE ID no. 703961
  misc_feature (1)..(515)
  Functional Homolog of CDNA ID no. 12676463at SEQ ID no. 120with e-value of 4.7E-102 and percent identity of 45.25
MAVSPLALVLLLLAFAVSLLYILRRPAPLRSGSDGGRRHLPPSPRGLPLLGHLHLLGSLPHRALRSLAAAHGPVLLLRLGRVPAVVVSSPAAAEEVMRARDLAFASRPRSAMADRLLYGRDVAFAPYGEYWRQARRVCVVHLLSPLRILSFRGVREEEAAALVERVRGAAAGGAAVDLCELLVAYANTVVSRAAFGDDSARGLYEEGNKERELRKVFNDFQELLGTAPLGELLPWLGWLDAVRGMEGKIRRTFKALDGVLEKVIGDHRRRRQAGQQTGDDGGDHRDFVDVLLDVSDTDDEAGMRLSTTEIKAIILDMFAAGTDTTSTAMEWAMAEVITHPDSMRKLQDELRAAVGGSGHVITEDHIDKLHYLKAVVKETLRLHPPIPLLVPREPQDDAEILGHHVPAGTRVVINAWAVGRDPAAWERAEEFVPERFLDGAVDYKGQDFQLIPFGAGRRGCPGVGFAAATVEMALASLMYHFDWEPAGASLDMREVNGLAVHLKSGLPLVAKLRFR

SEQ ID NO: 128 - protein, 502 aa, Persea americana
  misc_feature (1)..(502): Public GI no. 25282608
  misc_feature (1)..(502)
  Functional Homolog of CDNA ID no. 12676463at SEQ ID no. 120with e-value of 2.8E-111 and percent identity of 45.25
MAILVSLLFLAIALTFFLLKLNEKREKKPNLPPSPPNLPIIGNLHQLGNLPHRSLRSLANELGPLILLHLGHIPTLIVSTAEIAEEILKTHDLIFASRPSTTAARRIFYDCTDVAFSPYGEYWRQVRKICVLELLSIKRVNSYRSIREEEVGLMMERISQSCSTGEAVNLSELLLLLSSGTITRVAFGKKYEGEEERKNKFADLATELTTLMGAFFVGDYFPSFAWVDVLTGMDARLKRNHGELDAFVDHVIDDHLLSRKANGSDGVEQKDLVDVLLHLQKDSSLGVHLNRNNLKAVILDMFSGGTDTTAVTLEWAMAELIKHPDVMEKAQQEVRRVVGKKAKVEEEDLHQLHYLKLIIKETLRLHPVAPLLVPRESTRDVVIRGYHIPAKTRVFINAWAIGRDPKSWENAEEFLPERFVNNSVDFKGQDFQLIPFGAGRRGCPGIAFGISSVEISLANLLYWFNWELPGDLTKEDLDMSEAVGITVHMKFPLQLVAKRHLS

SEQ ID NO: 129 - DNA, 1614 bp, Arabidopsis thaliana
  misc_feature (1)..(1614): Ceres CDNA ID no. 23505103
  misc_feature (1)..(1614): Ceres CDNA ID no. 12721393
  misc_feature (1)..(1614): Also Known As  Ceres SEEDLINE ME04542
atgactattgatatgtatctttccttcgcttctcgttctggatcttctccatttccaagtctcgagctttgtctcagcattttcctcttcatctcccttttcgttttctggttgactccaggtggctttgcttgggcactctacaaagctcgtttccatacccgacctgagtccaaaaccggacctgccattcccggcccgtctggtctccccatctttggcctcctcttggcttttgtcaacaacgccttaacacacagaatcctcgccaatattgctgacacttgcaaagcaaaagctctcatggcgttctccgtagggtcaacccggtttgttataaccagcgaaccagagaccgcgaaagagcttctaaacagctctgcttttgcagaccggccagtgaaagagtctgcttacgagctgctctttgatagagccatggggtttgctccctttggtgattactggagagagttgaggagaatctcttctacccatctcttcagccctaagaggatcttcagttctggcgagtcccgccgaaaaatcgggcaaaacatggtaggagagatcaagaacgcaatggagtgttatggagaagtgcatataaaaaagatcttgcatttcggatcactcaacaacgtgatgtctagcgttttcggtaaaacatacaacttcaacgaaggtattgtctactcgaaagagagcaatgagttggagcatttggtgtctgaaggctatgagctgctcggaatcttcaactggagtgatcatttccctggaatgagatggttagatttacaaggtgtgaggagaagatgtcgtagtttggtcggtagagtgaatgtgttcgtcggtaagataatcaatgaccacaaatcaaagaggtcacttcgtgataatcctgaagagagcacttatgatgatgactttgtagatgtcttacttggcatgcacggcaacagcaaactttctgactccgatatgatcgcagtcctttgggaaatgatttttaggggaacagacacggtggcgattctcttggaatggatccttgcgaggatggttcttcaccctgacattcaagccaaggcgcaggccgagatcgattgtatcgtgggtgactcgggacgtcaagtcacagactcagacctccccaagctcccatacgttcgtgccattgtcaaggaaaccctaaggatgcacccacctggtcctctcctctcatgggctcgtctctccattcacgatactcagatcgggactcactttatacccgcaggaaccactgcgatggttaacatgtgggctataacccacgatgaaaaggtctggccggaagctcatgagtataaaccagagaggtttcttggtgcgcaagaaagtaataacttccccatcatgggatctgatctgaggcttgctcccttcggtgctggacgtagggtctgtcccggcaagtcaatgggtctagccaccgtggagctatggctagctcagttgctaggaagctataagtgggtctcatgtggtgaagtggatttgagtgagactttgaagctatctttggagatgaagaacactcttgtctgcaaggcaatccctaggggttaa

SEQ ID NO: 130 - protein, 537 aa, Arabidopsis thaliana
  misc_feature (1)..(537): Ceres CDNA ID no. 23505103
  misc_feature (1)..(537): Also Known As  Ceres SEEDLINE ME04542
  misc_feature (64)..(514): Pfam Name: p450 Pfam Description: Cytochrome P450
  misc_feature: Phenotype: Late Senescence Useful for delaying senescence
  misc_feature: Phenotype: Dark Green Useful for increasing chlorophyll and photosynthetic capacity
  misc_feature: Phenotype: Corkscrew Appearance Useful for making ornamental plants with modified flowers
  misc_feature: Phenotype: INFLORESCENCE Useful for making ornamental plants with modified flowers
  misc_feature: Phenotype: Strong Useful for making stronger plants
  misc_feature: Phenotype: Long Internode Useful for making taller plants and plants with longer flowers
  misc_feature: Phenotype: Tall Useful for making taller plants and plants with longer inflorescences
  misc_feature: Phenotype: Clubbed Useful for modifying fruit shape, composition and seed yield
  misc_feature: Phenotype: Reduced fertility Useful for sterility, genetic confinement systems
MTIDMYLSFASRSGSSPFPSLELCLSIFLFISLFVFWLTPGGFAWALYKARFHTRPESKTGPAIPGPSGLPIFGLLLAFVNNALTHRILANIADTCKAKALMAFSVGSTRFVITSEPETAKELLNSSAFADRPVKESAYELLFDRAMGFAPFGDYWRELRRISSTHLFSPKRIFSSGESRRKIGQNMVGEIKNAMECYGEVHIKKILHFGSLNNVMSSVFGKTYNFNEGIVYSKESNELEHLVSEGYELLGIFNWSDHFPGMRWLDLQGVRRRCRSLVGRVNVFVGKIINDHKSKRSLRDNPEESTYDDDFVDVLLGMHGNSKLSDSDMIAVLWEMIFRGTDTVAILLEWILARMVLHPDIQAKAQAEIDCIVGDSGRQVTDSDLPKLPYVRAIVKETLRMHPPGPLLSWARLSIHDTQIGTHFIPAGTTAMVNMWAITHDEKVWPEAHEYKPERFLGAQESNNFPIMGSDLRLAPFGAGRRVCPGKSMGLATVELWLAQLLGSYKWVSCGEVDLSETLKLSLEMKNTLVCKAIPRG

SEQ ID NO: 131 - protein, 502 aa, Glycine max
  misc_feature (1)..(502): Ceres CLONE ID no. 627596
MFLVAVFGYWLVPGGFAWAFSKFKPAIPGPSGYPVVGLVWAFIGPLTHRVLAKLAETFDAKPLMAFSVGFTRFIISSHPDTAKEILNSSAFADRPVKESAYELLFHRAMGFAPYGEYWRNLRRISATHMFSPRRIAAQGVFRARIGAQMVRDIVGLMGRDGVVEVRKVLHFGSLNNVMKSVFGRSYVFGEGGDGCELEGLVSEGYHLLGVFNWSDHFPLLGWLDLQGVRKSCRSLVDRVNVYVGKIILEHRVKRVAQGEDNKAIDTDSSGDFVDVLLDLEKENRLNHSDMVAVLWEMIFRGTDTVAILLEWILARMVLHPEIQAKAQSEIDSVVGSGRSVSDDDLPNLPYVRAIVKETLRMHPPGPLLSWARLSIHDTQIGNHFVPAGTTAMVNMWAITHDQEVWYEPKQFKPERFLKDEDVPIMGSDLRLAPFGSGRRVCPGKAMGLATVELWLAMFLQKFKWMPCDDSGVDLSECLKLSMEMKHSLKTKVVARPVVSLAM

SEQ ID NO: 132 - protein, 426 aa, Phalaenopsis sp. SM9108
  misc_feature (1)..(426): Public GI no. 1173624
MAFSVGLTRFIVSSHPKTAKEILSSPAFADRPIKESAYELLFNRAMGFAPFGDYWRNLRRISSTYLFSPRRVSSFEKQRSEIGEGMVRDMKRMMERNGVVEVRRMLHYGSLNNIMLTVFGKKFDFAKDEGLELELILKEGYELLGIFNWGDHLPLLGWLDLQGVRRRCRTLVAKVNVFVKKIIDEHKRRANGVGIDEGEGEDFVDVLLGLEEKDRLSESDMVAVLWEMIFRGTDTVAILLEWTLARMVLHPDIQSKAQVEIDSVVDSSRPVLDSDIQRLPYLQSIVKETLRMHPPGPLLSWARLAIHDVPVDGHMIPAGTTAMVNMWAITHDECNWAEPNKFNPDRFIDEDVNILGSDLRLAPFGSGKRVCPGKTMALAAVHLWLAQLLKSFKLLPSRNGVDLSECLKMSLEMKNPLVCVAVPRFE

SEQ ID NO: 133 - protein, 525 aa, Oryza sativa subsp. japonica
  misc_feature (1)..(525): Public GI no. 50939101
MALSSMAAAQESSLLLFLLPTSAASVFPPLISVVVLAALLLWLSPGGPAWALSRCRGTPPPPGVAGGAASALSGPAAHRVLAGISRAVEGGAAVMSLSVGLTRLVVASRPETAREILVSPAFGDRPVKDAARQLLFHRAMGFAPSGDAHWRGLRRASAAHLFGPRRVAGSAPEREAIGARIVGDVASLMSRRGEVPLRRVLHAASLGHVMATVFGKRHGDISIQDGELLEEMVTEGYDLLGKFNWADHLPLLRWLDLQGIRRRCNRLVQKVEVFVGKIIQEHKAKRAAGGVAVADGVLGDFVDVLLDLQGEEKMSDSDMIAVLWEMIFRGTDTVAILMEWVMARMVMHPEIQAKAQAEVDAAVGGRRGRVADGDVASLPYIQSIVKETLRMHPPGPLLSWARLAVHDARVGGHAVPAGTTAMVNMWAIAHDAAVWPEPDAFRPERFSEGEDVGVLGGDLRLAPFGAGRRVCPGRMLALATAHLWLAQLLHAFDWSPTAAGVDLSERLGMSLEMAAPLVCKAVARA

SEQ ID NO: 134 - protein, 479 aa, Triticum aestivum
  misc_feature (1)..(479): Ceres CLONE ID no. 906986
  misc_feature (276)..(276): Xaa is any aa, unknown, or other
  misc_feature (386)..(386): Xaa is any aa, unknown, or other
  misc_feature (388)..(388): Xaa is any aa, unknown, or other
  misc_feature (396)..(396): Xaa is any aa, unknown, or other
  misc_feature (401)..(401): Xaa is any aa, unknown, or other
  misc_feature (410)..(410): Xaa is any aa, unknown, or other
  misc_feature (426)..(426): Xaa is any aa, unknown, or other
MAALSRSVHGGAALMSFSVGLTRVVVSSRQDTAREILVNPAFGDRPVKDAARHLLFHRAMGFAPSGDAHWRALRRLAAAHLFGPRRVAASAPHRSSIGTRMLGDVASLMARHGEVAPRRFLHAASLNHVMAVVFGKRYDDFTSQEGVVVEEMVNEGYDLLGTFNWADHLPFLKWLDLQGVRCRCNRLVRQVEAYVGNIIQEHKARRASGSGIADELSGDFVDVLLGLDGEDKMSESDMIAVLWEMIFRGTDTVAILMEWIMARMVLHPEIQSKARXGAGRRGGAGQGRDGRGRGEAPLHPVHRQGDAAHAPAGPAPLVGAAGRARRARRRPPRPGRHDGDGEHVGHRARRGGVARAGAVPAGAVHGGGGERAGQRPPPGPVRRRAXRXPRQDAGPXHRPPXARPAAAPVXVGSRDRGLGGRRPVRXPEDVAGDGHPAGLQGRGSLGPERAAPACYRRRLRYLACRRRQRYLLYCLVFIG

SEQ ID NO: 135 - DNA, 1608 bp, Populus balsamifera subsp. trichocarpa
  misc_feature (1)..(1608): Ceres GDNA ANNOT ID no. 1471370
atgagaacagacatagatagcttctggatctttgctttggcctccaaatgcagagcctttacacaagaaaatattgcatggtcacttttgatcattggtttagcctggatagttgttaccctgatttactgggcataccctggtggtccagcttggggaaaatataaactcaaaaatacttccttgacaatttctaatccaattccaggtcccaggggattccccattaccggcagcatgaagcttatgacctccttagcacatcacaagattgcagctgctgcagatgcatgcaaagccaggaggctcatggcgtttagccttggtgatactcgtgttatcgtgacatgcaatcctgatgtcgctaaagaaatattgaacagctcggtgtttgcagatcgtccagttaaagaatctgcttatagcctaatgttcaatagagcaatcgggttcgctccttatggtgtctattggcgaacccttagaaaaatagcttctacacaccttttctgccccaagcaaatcaaagctgccgagtctcaaaggctccaaattgcttctcaaatggtgtcaacgttcaatgaccgagaaaagagcagtttcagcgttcgtgaggtccttaaaagagcttcacttaacaacatgatgtgttcagtttttggacgcgaatataaattggattcatttaataatgaagttgaagagctaagagctctagttgaagaggggtacgatttattgggtacacttaactggagtgaccaccttccttggctggcagattttgaccctcaaaaaatccggttcagatgctcaaatctcgtgccaaaagtgaaccggtttgtcagccgaattatagctgaacacagagctctaaccagaagtgaaaacccagatttcgttgatgttttgttgtctctccaaggccacgataaattatcggactccgatatgattgccgtcctttgggaaatgattttcagagggactgatacagtggcggttttgattgagtggattctagcgagaatggtgcttcatcctgatgttcaatcaaaggtccacgatgagctttacaaagttgttggaagatcaagggccgttgctgaatctgatatcacggccatggtgtatctccaggcagtggtgaaggaagtgttgaggctacacccacctggcccacttctctcgtgggccaggctagccatcaccgatacaaccattgatgggtatcacgtgccgaaagggaccacagcaatggttaacatgtgggccatttcaagggacccagagttttgggaggacccacttgaatttatgcccgagagattcgtcgtgactaaggaggatgtgttggagttttctgttctcggctcggatcttaggcttgctccgtttggttccggtaggcggacttgccctggaaagacattgggcataaccacggtgaccttctgggttgcatcactgttacacgagtatgaatgggtgccgggtgaagaaaacaacgttgacctatcagaagtattgcgactgtcctgtgagatggcgaatccattgaccgttaaagtgcggcccaggcgttcctcccaaagccctctgtactag

SEQ ID NO: 136 - protein, 453 aa, Populus balsamifera subsp. trichocarpa
  misc_feature (1)..(453): Ceres GDNA ANNOT ID no. 1471370
MTSLAHHKIAAAADACKARRLMAFSLGDTRVIVTCNPDVAKEILNSSVFADRPVKESAYSLMFNRAIGFAPYGVYWRTLRKIASTHLFCPKQIKAAESQRLQIASQMVSTFNDREKSSFSVREVLKRASLNNMMCSVFGREYKLDSFNNEVEELRALVEEGYDLLGTLNWSDHLPWLADFDPQKIRFRCSNLVPKVNRFVSRIIAEHRALTRSENPDFVDVLLSLQGHDKLSDSDMIAVLWEMIFRGTDTVAVLIEWILARMVLHPDVQSKVHDELYKVVGRSRAVAESDITAMVYLQAVVKEVLRLHPPGPLLSWARLAITDTTIDGYHVPKGTTAMVNMWAISRDPEFWEDPLEFMPERFVVTKEDVLEFSVLGSDLRLAPFGSGRRTCPGKTLGITTVTFWVASLLHEYEWVPGEENNVDLSEVLRLSCEMANPLTVKVRPRRSSQSPLY

SEQ ID NO: 137 - DNA, 1560 bp, Populus balsamifera subsp. trichocarpa
  misc_feature (1)..(1560): Ceres GDNA ANNOT ID no. 1500987
atgaagtccataccagcaaacctttcttccatactattttgcttagctgtcatcacccaccaaactccatggcctgttgctctccttttattctcgttatcctctttctttgctttctctctaaactattggttagtccctggaggttttgcatggagaaaccatcacgacaatcaaaacccttcaagatttcgtggtccaattgggtggcctatagtgggcactttaccccaaatgggttcacttgctcatcgaaaattagctagcatggctgcctcattaggggcaactaagcttatggcattcagtttaggctcaactcgtgtgataattagtagccatccagacacagccagggaaatcctatgcgggtgctctttcgctgaccgtcctattaaggaatcagctcgtttgttaatgtttgagcgtgccattggctttgctccttccggagactattggcgacacttgcgtagaattgcggcaaattacatgttttccccgaggaaaatctctgctctagagccacttaggcaacgtttagctaatgaaatggtggcagaagtgagagaggagatgaaggagagacgggttgttgtgttaagagacatattgcagaaaggttcattaagtaatgtattagagagtgtttttggtagtgatgtctctatagagagggaggagttagggttcatggttaaagaaggatttgacttgattgcagaatttaatttggatgactattttccactaaggtttttggactttcatggagtgaagagaaggtgttgtcagttggctggcaaggttaatagtgttgtgggtcaaattgtgaaggaaagaaaaggagctggagactcaaggagtggaagtgactttcttagtgctttgctatccttgcctgaggaagaccagttgaatgaatcagatatggtggctcttttatgggagatgatattccgaggaacagacacagttgctttgcttctcgagtggataatggctcggatggtggtgcacccagaaatccaagcaaaggcccaggaggagcttgacacgtgcattggcggccacagggaggtgcaagattcggatatccctaatctcccctacctccgagcaatagtcaaagaagtcctgagattgcacccacctggcccactactctcgtgggcccgcctagccatccatgatgtgcacgtggacaagacgttcatccctgccggcacaacagtgatggttaacatgtgggccataacacatgacccttccatttggagggatccatggtccttcaatcctgaccggttcattgaagaggatgtgctgattatgggctcagatctaaggctcgcaccatttggagcagggcgcagggtgtgtccaggcaaggcacttgggctagccacggtgcacctatggctcgcacggcttttacacgagtacagatggttacccgcaaaacccgtggatctttctgagtgtttaaggctctctctcgaaatgaaaaggccactggaatgtcatgtggttcaacgacggagcaaagtcacgcaatga

SEQ ID NO: 138 - protein, 441 aa, Populus balsamifera subsp. trichocarpa
  misc_feature (1)..(441): Ceres GDNA ANNOT ID no. 1500987
MGSLAHRKLASMAASLGATKLMAFSLGSTRVIISSHPDTAREILCGCSFADRPIKESARLLMFERAIGFAPSGDYWRHLRRIAANYMFSPRKISALEPLRQRLANEMVAEVREEMKERRVVVLRDILQKGSLSNVLESVFGSDVSIEREELGFMVKEGFDLIAEFNLDDYFPLRFLDFHGVKRRCCQLAGKVNSVVGQIVKERKGAGDSRSGSDFLSALLSLPEEDQLNESDMVALLWEMIFRGTDTVALLLEWIMARMVVHPEIQAKAQEELDTCIGGHREVQDSDIPNLPYLRAIVKEVLRLHPPGPLLSWARLAIHDVHVDKTFIPAGTTVMVNMWAITHDPSIWRDPWSFNPDRFIEEDVLIMGSDLRLAPFGAGRRVCPGKALGLATVHLWLARLLHEYRWLPAKPVDLSECLRLSLEMKRPLECHVVQRRSKVTQ

SEQ ID NO: 139 - DNA, 1635 bp, Populus balsamifera subsp. trichocarpa
  misc_feature (1)..(1635): Ceres GDNA ANNOT ID no. 1444471
atgagaacagacatagataacttctggatctttgctttggcctccaaatgcagagtctttacacaagaaaatattgcatggtcgcttttgatcatgggtttagcttggatagccactacccttatttactgggcataccctggtggtcctgcttggggcaaatacaaactcaaaaacacttccttcacaatttctaagccaattccaggtcccaggggattgcctcttataggcggcatgaggcttatgacctccttagcacatcacaagattgcagcggctgcagatgcatgcaaagccaggaggctcatggcgtttagccttggtgatactcgtgttatcgtgacatgcaatcctgatgtggctaaagaaatactgaacagttcggtgtttgcagatcgtccagttaaagaatctgcttatagcctaatgttcaatagagcaattgggttcgctccttatggtgtttactggcgaacccttagaaaaatagcttctacacaccttttctgccccaaacaaatcaaaactgcggcgtctcaaagacgccgaattgcttctgaaacggtgtccatgttcaatgaccatgaagggagtggtttcaccgttcgtgggatactcaagagagcttcacttaataacatgatgtgctcagtttttggacgcgagtatgaattggattcatgtaatagtgaagttgaagaactgagagctctagttgatgaagggtacgatttattgggtacacttaactggaccgaccaccttccttggctggcggattttgaccctcaaaaaatccgattcagatgctcaaatctcgtgccaaaagtgaaccggtttgtcagccgaatcctggctgagcatagagctcaagctggaaatgaaaccccggatttcgttgatgttttgctgtctcttcaaggccacgataaattatcggactccgatatgattgccgtcctttgggaaatgattttcaggggcactgatacggtggcagttttgatggagtggattctagctagaatggtacttcatcctgatgttttatcaaaggtccatgatgagcttgacaaagttgttggaagatcaagggccgtagctgaatctgatatcacggcaatggtgtatctccaggcagcagtgaaggaagtgttgaggctacacccacctggtccacttctctcgtgggccaggcttgccatcactgatacaaccatagatgggtatcacgtgcctaaagggaccacagcaatggttaacatgtgggccatttcaagggacccagattcttgggaggacccgcttgaatttatgcctgagagattcgtgactaagaagggtgagctggagttttctgttcttgggtcggatctaaggcttgctccgtttggttccggtaggcgaacctgcccgggaaagacattgggcttaactacggtgaccttttgggttgcgtcactactacacgagtatgaatggctgccgtgcgatggaaataaagttgacctatcagaagtactgggtctgtcctgtgagatggcaaatccattgaccgttaaactgcggcccaggcgttcccattataagcccactgtactaggtgtacagaactacgtactagatgtctag

SEQ ID NO: 140 - protein, 513 aa, Populus balsamifera subsp. trichocarpa
  misc_feature (1)..(513): Ceres GDNA ANNOT ID no. 1444471
MGLAWIATTLIYWAYPGGPAWGKYKLKNTSFTISKPIPGPRGLPLIGGMRLMTSLAHHKIAAAADACKARRLMAFSLGDTRVIVTCNPDVAKEILNSSVFADRPVKESAYSLMFNRAIGFAPYGVYWRTLRKIASTHLFCPKQIKTAASQRRRIASETVSMFNDHEGSGFTVRGILKRASLNNMMCSVFGREYELDSCNSEVEELRALVDEGYDLLGTLNWTDHLPWLADFDPQKIRFRCSNLVPKVNRFVSRILAEHRAQAGNETPDFVDVLLSLQGHDKLSDSDMIAVLWEMIFRGTDTVAVLMEWILARMVLHPDVLSKVHDELDKVVGRSRAVAESDITAMVYLQAAVKEVLRLHPPGPLLSWARLAITDTTIDGYHVPKGTTAMVNMWAISRDPDSWEDPLEFMPERFVTKKGELEFSVLGSDLRLAPFGSGRRTCPGKTLGLTTVTFWVASLLHEYEWLPCDGNKVDLSEVLGLSCEMANPLTVKLRPRRSHYKPTVLGVQNYVLDV

SEQ ID NO: 141 - DNA, 1572 bp, Populus balsamifera subsp. trichocarpa
  misc_feature (1)..(1572): Ceres GDNA ANNOT ID no. 1490915
atgatgtccttgctagccaacctttctttcttactctttttcctggccatcatcacccaccaaactccatggcctatcactgtccttttactctcattattctcttcttttgctctctctctgaactattggttagtccctggaggttttgcatggagaaaccatcacgacaatcaaaacccttcaaagttccggggtccaattggctggcctgtattcggcactctacctcaaatgggttcacttgctcatcgaaaactagctagcatggctacctcgttaggtgcaactaagcttatggcatttagtctaggcacaactcgtgtgatcattagtagccacccagacacggccagggaaatcctatgggggtcttctttcgctgaccgtcctgtaaaggaatcagctcgtttgttaatgtttgagcgtgccattggctttgctccatccggggactattggcgacacttacgtagaattgctgcaaatcatatgttttcccctaagaaaatctctggtctagagccacttaggcaacgtttagctaatgaaatgttggcggaagtgagtggggagatgaaggagagacgggctgttgtgctaagagggatattacaaaaaagttcattaagcaatgtactggagagtgttcttggcagtgatgtccatgtaaaaagggaggagttagggttcatggctcaagaaggatttgacttggtttcaagatttaatttggaggactattttccactaaggtttttagacttttatggggtgaagagaaggtgttataagctggctggcaaggtcaatagtcttgtgggtcaaattgtgagggaaagaaaaagagctggagacttcaggagtcgtactgactttcttagtgctttgttgtctttgcccgagcaagagcggttggacgaatcagatatggttcctcttttgtgggagatgatatttcgaggaacggacacagttgctatacttctcgagtggatcatggcgaggatggtgttgcacccagagatccaagctaaggcccagcaagagcttgaaaagttcatcggcaatcacaggcgagtgcaagattctgacatccctaatctaccctacctccaagcaatagtcaaggaagtcctacgactgcacccacctggcccacttctctcgtgggcccgccttgccatccatgatgtgcacgtggacaaaatgtctatcccagctggcacaacagcaatggtcaacatgtgggccataacacacgacccgtccatttggagggatccgtgggccttcaatccagaccggttcatggaagaggatgtgttgataatgggttcagacttgaggcttgcacctttcgggtcagggcgcagggtgtgtccaggcaaggcacttgggttagccacggtgcacctctggctagcacggcttttacacgagtacaagtggctacccgccaagcctgtggatctttccgagtgtttgaggctctctctcgaaatgaaaaggccactggaatgccatgtcgttccatggagcaaagttgccgattttgatcagaaaacttag

SEQ ID NO: 142 - protein, 523 aa, Populus balsamifera subsp. trichocarpa
  misc_feature (1)..(523): Ceres GDNA ANNOT ID no. 1490915
MMSLLANLSFLLFFLAIITHQTPWPITVLLLSLFSSFALSLNYWLVPGGFAWRNHHDNQNPSKFRGPIGWPVFGTLPQMGSLAHRKLASMATSLGATKLMAFSLGTTRVIISSHPDTAREILWGSSFADRPVKESARLLMFERAIGFAPSGDYWRHLRRIAANHMFSPKKISGLEPLRQRLANEMLAEVSGEMKERRAVVLRGILQKSSLSNVLESVLGSDVHVKREELGFMAQEGFDLVSRFNLEDYFPLRFLDFYGVKRRCYKLAGKVNSLVGQIVRERKRAGDFRSRTDFLSALLSLPEQERLDESDMVPLLWEMIFRGTDTVAILLEWIMARMVLHPEIQAKAQQELEKFIGNHRRVQDSDIPNLPYLQAIVKEVLRLHPPGPLLSWARLAIHDVHVDKMSIPAGTTAMVNMWAITHDPSIWRDPWAFNPDRFMEEDVLIMGSDLRLAPFGSGRRVCPGKALGLATVHLWLARLLHEYKWLPAKPVDLSECLRLSLEMKRPLECHVVPWSKVADFDQKT

SEQ ID NO: 143 - protein, 552 aa, Triticum aestivum
  misc_feature (1)..(552): Ceres CLONE ID no. 779234
MAPSEKCGWLLYVSLAAKCCGNGDGKPYRVVGFVVVLLAAFVVTSLLHWASQGGAAWGRYWWRRKGLGIGEARIPGPRGFPVIGSMGLMTGLAHRKLAAAAAGNVRRRRLMSFSMGETRVVVTADPDVARELLASPAFADRPVKESAYGLMFHRAIGFAPYGAYWRTLRRVSSSHLFSPRQVAASAAQRAVIAHQMVDAMRPVGGAGVKHVEARRFLKRASLHNVMWSVFGRRYELDEAGSGEAAELKSLVDEGYDLLGQLNWSDHLPWLARFDLQKIRSRCSALVPRVNRFVGRIIDEHRAALNDDDDAVVDFTDVLLSLQGSDKLSDADMIAVLWEMIFRGTDTVAVVIEWVLARLMLHQDVQARVHEELDRVVGPNRAVTESDAASLVFLQAVVKEVLRLHPPGPLLSWARLATSDVHVDGLHVPAGTTAMVNMWAITHDPTVWVKPAEFKPERFLGGSSSDHAAAGAEFSVTGSDLRLAPFGSGRRSCPGKSLAIATVGFWVATLLHEFEWTPPSSDGSGGVDLSEVLRLSCEMAAPLEARLRPRRAV

SEQ ID NO: 144 - protein, 546 aa, Zea mays
  misc_feature (1)..(546): Ceres CLONE ID no. 1551657
MAAPPTEDCGWLLYLSLAAKCGDPSRLLGLAAVFVAACVVTSLLHWACPGGPAWGRYWWTRRGGLGIVRAAIPGPRGLPVVGSMGLMTGLAHRKLAAAAVSQGSSRRRRLMALSLGETRAVVTGDPDVARELLGSAAFADRPVKESAYGLLFHRAIGFAPHGAYWRALRRVASAHLFSPRQVAASSAQRAVIARQMVDAVTTTTTTTAPAVVVARRFLKRASLHNVMWSVFGRRYDLLLAADGEELKALVDEGYDLLGQLNWSDHLPWLARFDLQRTRARCSALVPRVNRFVGNIIDEHRARLGDTGVTDFTDVLLSLQGVDKLSDADMVAVLWEMIFRGTDTVAVLMEWVLARLVLHQDVQSKVQEELDRVVGPPGQAASVTESDTASLVYLQAVIKEVLRLHPPGPLLSWARLATSDARVGGYHVPAGTTAMVNMWAITHDPSVWAEPTEFRPERFVGAPAGAGAEDVPMIMGSDLRLAPFGSGRRSCPGKSLALATVGFWVATLLHEFKWLPPCRGVDLSEVLRLSCEMAAPLEARVVPRHAV

SEQ ID NO: 145 - DNA, 1767 bp, Populus balsamifera subsp. trichocarpa
  misc_feature (1)..(1767): Ceres GDNA ANNOT ID no. 1438105
atgatgtccttgctagccaacctttctttcttactctttttcctggccatcatcacccaccaaactccatggcctatcactgtccttttactctcattattctcttcttttgctctctctctgaactattggttagtccctggaggttttgcatggagaaaccatcacgacaatcaaaacccttcaaagttccggggtccaattggctggcctgtattcggcactctacctcaaatgggttcacttgctcatcgaaaactagctagcatggctacctcgttaggtgcaactaagcttatggcatttagtctaggcacaactcgtgtgatcattagtagccacccagacacggccagggaaatcctatgggggtcttctttcgctgaccgtcctgtaaaggaatcagctcgtttgttaatgtttgagcgtgccattggctttgctccatccggggactattggcgacacttacgtagaattgctgcaaatcatatgttttcccctaagaaaatctctggtctagagccacttaggcaacgtttagctaatgaaatgttggcggaagtgagtggggagatgaaggagagacgggctgttgtgctaagagggatattacaaaaaagttcattaagcaatgtactggagagtgttcttggcagtgatgtccatgtaaaaagggaggagttagggttcatggctcaagaaggatttgacttggtttcaagatttaatttggaggactattttccactaaggtttttagacttttatggggtgaagagaaggtgttataagctggctggcaaggtcaatagtcttgtgggtcaaattgtgagggaaagaaaaagagctggagacttcaggagtcgtactgactttcttagtgctttgttgtctttgcccgagcaagagcggttggacgaatcagatatggttcctcttttgaatttaaaaggttccttgtcttcttttcaagatttgaaaacaaccattatgatcttgaaaaacaacattttactgctagaatctcagtctacctccctttttatccacacttcttcgtccattgactcacagaacattatcaattcacttgtggttccactaactcacaacaagaactttgtcgggcaaaatgcgcaggagatgatatttcgaggaacggacacagttgctatacttctcgagtggatcatggcgaggatggtgttgcacccagagatccaagctaaggcccagcaagagcttgaaaagttcatcggcaatcacaggcgagtgcaagattctgacatccctaatctaccctacctccaagcaatagtcaaggaagtcctacgactgcacccacctggcccacttctctcgtgggcccgccttgccatccatgatgtgcacgtggacaaaatgtctatcccagctggcacaacagcaatggtcaacatgtgggccataacacacgacccgtccatttggagggatccgtgggccttcaatccagaccggttcatggaagaggatgtgttgataatgggttcagacttgaggcttgcacctttcgggtcagggcgcagggtgtgtccaggcaaggcacttgggttagccacggtgcacctctggctagcacggcttttacacgagtacaagtggctacccgccaagcctgtggatctttccgagtgtttgaggctctctctcgaaatgaaaaggccactggaatgccatgtcgttccatggagcaaagttgccgattttgatcagaaaacttag

SEQ ID NO: 146 - protein, 588 aa, Populus balsamifera subsp. trichocarpa
  misc_feature (1)..(588): Ceres GDNA ANNOT ID no. 1438105
MMSLLANLSFLLFFLAIITHQTPWPITVLLLSLFSSFALSLNYWLVPGGFAWRNHHDNQNPSKFRGPIGWPVFGTLPQMGSLAHRKLASMATSLGATKLMAFSLGTTRVIISSHPDTAREILWGSSFADRPVKESARLLMFERAIGFAPSGDYWRHLRRIAANHMFSPKKISGLEPLRQRLANEMLAEVSGEMKERRAVVLRGILQKSSLSNVLESVLGSDVHVKREELGFMAQEGFDLVSRFNLEDYFPLRFLDFYGVKRRCYKLAGKVNSLVGQIVRERKRAGDFRSRTDFLSALLSLPEQERLDESDMVPLLNLKGSLSSFQDLKTTIMILKNNILLLESQSTSLFIHTSSSIDSQNIINSLVVPLTHNKNFVGQNAQEMIFRGTDTVAILLEWIMARMVLHPEIQAKAQQELEKFIGNHRRVQDSDIPNLPYLQAIVKEVLRLHPPGPLLSWARLAIHDVHVDKMSIPAGTTAMVNMWAITHDPSIWRDPWAFNPDRFMEEDVLIMGSDLRLAPFGSGRRVCPGKALGLATVHLWLARLLHEYKWLPAKPVDLSECLRLSLEMKRPLECHVVPWSKVADFDQKT

SEQ ID NO: 147 - protein, 543 aa, Zea mays
  misc_feature (1)..(543): Ceres CLONE ID no. 1600726
MAPPTEDCGWLLYLSLAAKCGDPQRLLGFAAVFVAACVVTSLLHWASPGGPAWGWYWWTRRAGLGIVRAAIPGPRGLPVVGSMGLMTGLAHRKLSAAAERQASRRRLMAFSLGETRVVVTADLDVARELLASAAFADRPVKESAYGLLFHRAIGFAPHGAYWRALRRVASAHLFSPRQIAASAAQRAAIARQMVDATTTAAAHAPVVVARRFLKRASLHNVMWSVFGRRYDLMADSREAEELKALVDEGYDLLGQLNWSDHLPWLARFDLQKTRARCCALVPRVNRFVGNIIGEHRARLGRGGDTAVMDFTDVLLSLQGDDKLSDADMIAVLWEMIFRGTDTVAVLIEWVLARLVLHQDVQSKVQEELDRVVGLGQAVTESDTASLPYLQAVIKEVLRLHPPGPLLSWARLATSDVYVSGYLVPAGTTAMVNMWAITHDPSLWPEPMEFRPERFMGPAAEDVPIMGSDLRLAPFGSGRRSCPGKSLAVATVGFWVATLLYEFKWLPPSDEPRGGGVDLSEVLRLSCEMAAPLEARVVPRHAVC

SEQ ID NO: 148 - protein, 557 aa, Zea mays
  misc_feature (1)..(557): Ceres CLONE ID no. 1601442
MAAPPTEDCGWLLYLSLAAKCGDPSRLLGLAAVFVGACVVTSLLHWACPGGPAWGRYWWTRRGGLGIVRAAIPGPRGLPVVGSMGLMTGLAHRKLAAAAAAAGGQGSSRRRRLMALSLGETRAVVTGDPDVARELLGSAAFADRPVKESAYGLLFHRAIGFAPHGAYWRALRRVASAHLFSPRQVAASSAQRAVIARQMVDAVTTAAPAPAPAVVVARRFLKRASLHNVMWSVFGRRYDLLLLAADGEELKALVDEGYDLLGQLNWSDHLPWLARFDLQRTRARCSALVPRVNRFVGNIIDEHRARLGLGDTGGVTDFTDVLLSLQGVDKLSDADMVAVLWEMIFRGTDTVAVLMEWVLARLVLHQDVQSKVQEELDRVVGPPGQAASVTESDTASLVYLQAVIKEVLRLHPPGPLLSWARLATSDARVGGYHVPAGTTAMVNMWAITHDPSVWAEPTEFRPERFVGASAGAGAGAGAEDVPMIMGSDLRLAPFGSGRRSCPGKSLALATVGFWVATLLHEFKWLPPCRGVDLSEVLRLSCEMAAPLEARVVPRHAV

SEQ ID NO: 149 - protein, 553 aa, Pinus radiata
  misc_feature (1)..(553): Public GI no. 5921925
MENRRSSGGSGWWVCVLPLFTKDGPAYFLHSSSDDVSAWRQWPLYIALLIVAVCAVLVSWLSPGGCAWAGRHKRGRVAIPGPKGWPIIGSLMDMSVGLPHRKLESLARLHGAKQLMSFSLGCTPAVITSDPEVARELLTSPHFANRPLKQSAQQLLFGRAIGFAPNGGYWRLLRRIASAHLFAPRRIAAHEAGRQADVVAMLDDIQKEYHSKGVVRVRRHLQGAALNNIMGSVFGRRFDMSHENEEVKKLREMVDEGFQLLGAFNWADHLPWLRPLDPLRIHARCARLVPRVTTFVSNIIEQHRREEQRRESGDQCDFVDVLLSLQGEDKLDEEDMIAVLWEMIFRGTDTTALLTEWTMAELVLHPEAQKKAQAELDAVVGHDRSVKDSDIPKLPYIQAVVKEALRMHPPGPLLSWARLSTEDVNMGDGMCVPAGTTAMVNMWSITHDPNIWESPYEFRPERFVVFEGGEEVDVRGNDLRLAPFGAGRRVCPGKALGLATVNLWVAKLLHHFEWLPHAEHPVDLSEVLKLSCEMARPLHCVPVTRVPFAKFSD

SEQ ID NO: 150 - DNA, 1551 bp, Arabidopsis thaliana
  misc_feature (1)..(1551): Ceres CDNA ID no. 36531424
  misc_feature (1)..(1551): Also Known As  Ceres SEEDLINE ME04555
atggctctgataaccttacttgaagtctcaatttctttactctttttctccttcctttacggatatttcttgattagcaagaaacctcaccgttcgtttctcaccaactggccatttctcggtatgcttccgggtttactcgtggagatccctcgtgtttacgactttgtaaccgagcttctcgaggcctcaaacttaacttatcctttcaaaggtccgtgttttgggggccttgacatgttgatcaccgttgatccggctaatatccatcacatcatgagctcaaacttcgcgaattacccgaaaggaaccgagttcaagaagatattcgatgttttgggagatgggattttcaacgcggattcggagttatggaaagatctgaggaaatcagctcaaagcatgatgactcatcaagattttcaaaggtttacactaagaacaatcatgagtaagctagagaaagggcttgtcccacttcttgattacgttgctgaaaagaaacaagtcgttgacttacaagatgtgttccaaagatttacgttcgacacttcgtttgttttagcgaccggggttgacccgggttgtctctcgactgaaatgccgcaaatcgagtttgctagagctttagacgaagcagaggaagcaattttcttcaggcatgtgaagccagagattgtttggaagatgcagaggtttattgggtttggagatgagttgaaaatgaagaaagctcactcgacattcgaccgagtttgctctaaatgcatagcttctaagagagatgaaataaccaatggggttataaacattgactcttcttctaaagatttgttgatgtgctacatgaatgtggatacaatttgtcatacaaccaagtacaagttgttgaatccaagtgatgacaaattccttagagacatgatcttaagcttcatgttagctggtagagacaccacaagctctgctctcacttggttcttttggcttctctctaagaacccaaaagccataaccaagattcgtcaagaaatcaacacacaactatctccaagaaccaatgattttgattcattcaatgctcaagagttaaacaagttggtgtatgtacatggagcattgtgtgaagcccttaggctatatccaccggttccatttcagcacaagtctcctacaaaatccgacgttcttccaagtggacacagagtcgatgcgagttcgaagattgtgttctgtctttactcattagggagaatgaaatcagtttggggagaagatgcatcggaatttaaaccggagagatggatttcagagagtggaaggttgattcacgtgccttcttttaagttcttatcgtttaatgccggtccaaggacttgtttggggaaagaagtggctatgacacagatgaagacagtggctgtgaaaattatacaaaactatgagataaaggtcgttgaaggacacaagatcgagccagttccttctattattcttcacatgaagcatggtcttaaagttacagtcactaagagatctaatttgctctga

SEQ ID NO: 151 - protein, 516 aa, Arabidopsis thaliana
  misc_feature (1)..(516): Ceres CDNA ID no. 36531424
  misc_feature (1)..(516): Also Known As  Ceres SEEDLINE ME04555
  misc_feature (32)..(509): Pfam Name: p450 Pfam Description: Cytochrome P450
  misc_feature: Phenotype: Short Useful for increasing seed/fruit yield or modifying fruit content
MALITLLEVSISLLFFSFLYGYFLISKKPHRSFLTNWPFLGMLPGLLVEIPRVYDFVTELLEASNLTYPFKGPCFGGLDMLITVDPANIHHIMSSNFANYPKGTEFKKIFDVLGDGIFNADSELWKDLRKSAQSMMTHQDFQRFTLRTIMSKLEKGLVPLLDYVAEKKQVVDLQDVFQRFTFDTSFVLATGVDPGCLSTEMPQIEFARALDEAEEAIFFRHVKPEIVWKMQRFIGFGDELKMKKAHSTFDRVCSKCIASKRDEITNGVINIDSSSKDLLMCYMNVDTICHTTKYKLLNPSDDKFLRDMILSFMLAGRDTTSSALTWFFWLLSKNPKAITKIRQEINTQLSPRTNDFDSFNAQELNKLVYVHGALCEALRLYPPVPFQHKSPTKSDVLPSGHRVDASSKIVFCLYSLGRMKSVWGEDASEFKPERWISESGRLIHVPSFKFLSFNAGPRTCLGKEVAMTQMKTVAVKIIQNYEIKVVEGHKIEPVPSIILHMKHGLKVTVTKRSNLL

SEQ ID NO: 152 - protein, 516 aa, Arabidopsis thaliana
  misc_feature (1)..(516): Public GI no. 79501393
  misc_feature (1)..(516)
  Functional Homolog of CDNA ID no. 36531424at SEQ ID no. 151with e-value of 2.1E-218 and percent identity of 80.95
MALVSLLEISIAFFCFLIFRIFLISKKPHRSFLTNWPLLGMLPGLLTVLPRVYDFITEVLEDGNLNYLFIGPFLGGIDMLFTVDPANIHHIMSSNFANYPKGTEFKKLFDVLGDGIFNADSDLWKDLRKSSQSMMNHPDFQRFSLATSLSKLEKGLVPLLDHVAKEKLVVDLQDVFQRFTFDTTFVLATGYDPGCLSVEMPEIEFARALDDAEEAIFYRHFKPEVVWKMQRLIGVGAELKLKRAHAIFDRVCSKCIASKRDEISQGIDSSSSKDLLMSSINVDTTKYKLLNPSDDRFLRDTILSFMLAGRDTTGSALTWFFWLLCNNQEAMTKIRQEINTNLFPRNKTDDGSVSYDSDSFNPQEVKKLVYLHGAVCEALRLYPPVPFNHKSPAKPDVLPSGHKVKANSRILFCLYSLGRMKSVWGEDAMEFKPERWISESGRSVHEPSYKFLSFNAGPRTCLGKEVAMTQMKTVAVKIIQNYDINVVEGHKIKPAPSVILHMKHGLKVTVSKRCLS

SEQ ID NO: 153 - DNA, 1518 bp, Populus balsamifera subsp. trichocarpa
  misc_feature (1)..(1518): Ceres GDNA ANNOT ID no. 1509745
atggcatcactagggcttcttgaaatcttcttcgcaattgttgccctggccatctcttgctgtttcggaaacaaaaaaaagaggctgccgaggaactggccgcttgtaggaatgctgccagattctatccggaacctccaccggccatatgaaaggatcgcagaggttatacagctaagtgggggcagttttatatacaaaagcctctggttttttagccctaacgtcttgaacactgtggatccagccaacatacattacataatgagctcaaacttctcaaactttccaaaggggtctatgttctctagaatatttgatattcttggagatggtattttcaatgctgattcacacttgtggaagaatcagaggaaacttgctcacgtgttgattaatcaccagcagtttcagaggttcttggtgaagagtagctggaataaggtggagaaagggctcattccagtccttgagcatgtggctaagcaaggctcagtggtagacttacaagatgtgttccaaaggtttacatttgatatcacttccatactggtaactgggtatgacccaggatgcctctccattgaattccctcaagttgaattctcaaaggcaatggatgatgctgaagaagcaatattttataggcatctctggccagaaatatttttgaagctacaaaggtggctagggtttggacaagagcagaaactgaaagaagcttggcaaacgctggatcatatggtagcagaatatatatcaaggaaaagggaaaaactcagcaagaaaaccacaacgatagaagatgaagatggtgttgacttgttaacgtcatacatgagtcatcctgaaatcatgggattaaaaacagacgacaaatttctaagagacaccattgtaaatttctttctagcagggagagacaccactagctctgctcttacttggtttttctggcttgtttctcagaatcctcaagtagaaagcaagattagacaagagttaaaagcaaccatgccagcagaagaaagggagaattggaggctatttagcacacaagagctaagcaatctagtttatctccatggggccctgtgcgaaacgttaaggctttatccacctgtcccattccagcataaggaacctctaaagtcagatgtccttccatcggggcaccgtgtcggtccgaacatgatggtgctattttccgtgtatgtgatgggaaggatgacatcaatatggggaccagattgcttagaatttaagccagaaaggtggatctctgacagtggaaagatcaaacatgaaccctcatacaagtttttagctttcaatgctggtccaaggacttgtttggggagaggtgttgctttcactcaaatgaaggcagtagcagctgctataatccacaactaccaagttcacgtggtggaaggccaccctgtggctcctagtagctccatcattcttcatatgaagcatggcttaaaggtcagtctttcaaggaaatggatctga

SEQ ID NO: 154 - protein, 468 aa, Populus balsamifera subsp. trichocarpa
  misc_feature (1)..(468): Ceres GDNA ANNOT ID no. 1509745
  misc_feature (1)..(468)
  Functional Homolog of CDNA ID no. 36531424at SEQ ID no. 151with e-value of 3.6E-143 and percent identity of 57.33
MLPDSIRNLHRPYERIAEVIQLSGGSFIYKSLWFFSPNVLNTVDPANIHYIMSSNFSNFPKGSMFSRIFDILGDGIFNADSHLWKNQRKLAHVLINHQQFQRFLVKSSWNKVEKGLIPVLEHVAKQGSVVDLQDVFQRFTFDITSILVTGYDPGCLSIEFPQVEFSKAMDDAEEAIFYRHLWPEIFLKLQRWLGFGQEQKLKEAWQTLDHMVAEYISRKREKLSKKTTTIEDEDGVDLLTSYMSHPEIMGLKTDDKFLRDTIVNFFLAGRDTTSSALTWFFWLVSQNPQVESKIRQELKATMPAEERENWRLFSTQELSNLVYLHGALCETLRLYPPVPFQHKEPLKSDVLPSGHRVGPNMMVLFSVYVMGRMTSIWGPDCLEFKPERWISDSGKIKHEPSYKFLAFNAGPRTCLGRGVAFTQMKAVAAAIIHNYQVHVVEGHPVAPSSSIILHMKHGLKVSLSRKWI

SEQ ID NO: 155 - DNA, 1542 bp, Populus balsamifera subsp. trichocarpa
  misc_feature (1)..(1542): Ceres GDNA ANNOT ID no. 1456553
atgacagcttgtgggacactttcaatggcatcactagggcttcttgaaatcttcttcgcaattgttgccctggccatctcttgctgtttcggaaacaaaaaaaagaggctgccgaggaactggccgcttgtaggaatgctgccagattctatccggaacctccaccggccatatgaaaggatcgcagaggttatacagctaagtgggggcagttttatatacaaaagcctctggttttttagccctaacgtcttgaacactgtggatccagccaacatacattacataatgagctcaaacttctcaaactttccaaaggggtctatgttctctagaatatttgatattcttggagatggtattttcaatgctgattcacacttgtggaagaatcagaggaaacttgctcacgtgttgattaatcaccagcagtttcagaggttcttggtgaagagtagctggaataaggtggagaaagggctcattccagtccttgagcatgtggctaagcaaggctcagtggtagacttacaagatgtgttccaaaggtttacatttgatatcacttccatactggtaactgggtatgacccaggatgcctctccattgaattccctcaagttgaattctcaaaggcaatggatgatgctgaagaagcaatattttataggcatctctggccagaaatatttttgaagctacaaaggtggctagggtttggacaagagcagaaactgaaagaagcttggcaaacgctggatcatatggtagcagaatatatatcaaggaaaagggaaaaactcagcaagaaaaccacaacgatagaagatgaagatggtgttgacttgttaacgtcatacatgagtcatcctgaaatcatgggattaaaaacagacgacaaatttctaagagacaccattgtaaatttctttctagcagggagagacaccactagctctgctcttacttggtttttctggcttgtttctcagaatcctcaagtagaaagcaagattagacaagagttaaaagcaaccatgccagcagaagaaagggagaattggaggctatttagcacacaagagctaagcaatctagtttatctccatggggccctgtgcgaaacgttaaggctttatccacctgtcccattccagcataaggaacctctaaagtcagatgtccttccatcggggcaccgtgtcggtccgaacatgatggtgctattttccgtgtatgtgatgggaaggatgacatcaatatggggaccagattgcttagaatttaagccagaaaggtggatctctgacagtggaaagatcaaacatgaaccctcatacaagtttttagctttcaatgctggtccaaggacttgtttggggagaggtgttgctttcactcaaatgaaggcagtagcagctgctataatccacaactaccaagttcacgtggtggaaggccaccctgtggctcctagtagctccatcattcttcatatgaagcatggcttaaaggtcagtctttcaaggaaatggatctga

SEQ ID NO: 156 - protein, 513 aa, Populus balsamifera subsp. trichocarpa
  misc_feature (1)..(513): Ceres GDNA ANNOT ID no. 1456553
  misc_feature (1)..(513)
  Functional Homolog of CDNA ID no. 36531424at SEQ ID no. 151with e-value of 2.7E-147 and percent identity of 56.31
MTACGTLSMASLGLLEIFFAIVALAISCCFGNKKKRLPRNWPLVGMLPDSIRNLHRPYERIAEVIQLSGGSFIYKSLWFFSPNVLNTVDPANIHYIMSSNFSNFPKGSMFSRIFDILGDGIFNADSHLWKNQRKLAHVLINHQQFQRFLVKSSWNKVEKGLIPVLEHVAKQGSVVDLQDVFQRFTFDITSILVTGYDPGCLSIEFPQVEFSKAMDDAEEAIFYRHLWPEIFLKLQRWLGFGQEQKLKEAWQTLDHMVAEYISRKREKLSKKTTTIEDEDGVDLLTSYMSHPEIMGLKTDDKFLRDTIVNFFLAGRDTTSSALTWFFWLVSQNPQVESKIRQELKATMPAEERENWRLFSTQELSNLVYLHGALCETLRLYPPVPFQHKEPLKSDVLPSGHRVGPNMMVLFSVYVMGRMTSIWGPDCLEFKPERWISDSGKIKHEPSYKFLAFNAGPRTCLGRGVAFTQMKAVAAAIIHNYQVHVVEGHPVAPSSSIILHMKHGLKVSLSRKWI

SEQ ID NO: 157 - protein, 476 aa, Zea mays
  misc_feature (1)..(476): Ceres CLONE ID no. 365873
  misc_feature (1)..(476)
  Functional Homolog of CDNA ID no. 36531424at SEQ ID no. 151with e-value of 1.7E-113 and percent identity of 49.13
MLPALLGNLHHLHDWITSLLVASQLSFLFTGPPRSGMQFFVTADPANVRHVFTSNFANYPKGPEFEEIFDVLGGGIFNADGESWRRQRAKAQLLMSSAPFRALVSRYSRAKVDTALLPLLSHMAATGEAFDLQDVFLRLTFDTTTTLVFGVDPGCLSVGLPEVPFARAMDDAMGVLLLRHVVPMTWWKLARRLRIGHERKMAEAWRTIDQFVADTIAKRRAEKARHGNEQVSADLLSSYINDDEGEDEEGGVDAFLRDTTINLMLAGRDTTGSALSWFFYLLTRNPRVVAKIRQELECVKSKSSGGGMASFDPDELSRLTYLHAALCESLRLYPPVPQELKEAAAADVLPCRHEVRAGDKILVSLYAMGRMEEVWGSDCREFRPERWIPELEDGRRVVQQVRYVPSYKFMSFNSGPRTCLGKDMAFVQLKAAAAAVVSNFDVEAVPGHVVEPMLSIILHMKNGFMATVKRRRQTFA

SEQ ID NO: 158 - protein, 463 aa, Glycine max
  misc_feature (1)..(463): Ceres CLONE ID no. 511739
  misc_feature (1)..(463)
  Functional Homolog of CDNA ID no. 36531424at SEQ ID no. 151with e-value of 2.6E-117 and percent identity of 48.80
  misc_feature (66)..(66): Xaa is any aa, unknown, or other
  misc_feature (400)..(400): Xaa is any aa, unknown, or other
MLPQLLFNLWRAHDYSTQVLQRHGGTGEFIGPWFTNMDYLVTCDPINVHHMLSKNFHNYVKGPEFXHIFQAFGDGIFAADSEAWKYSRDLFHSLFKQKSFEVFVAKTIHNKVHNGLLPILDHVQQQGRVVDLQDVFNRFTFDNICSIVLGNNPNCLSIDFSEVAIEKAFNEVEESIFYRHVVPRCVWKIQRWLQIGQEKKMTEACKTLDQFIHACIASKREKLSKYNENEMGEAHHVDFLTALMREETAHDDKFLRDAVFNLFVAGRDTITSALTWFFWLVATNPSVEAKILDEMKEKLGTKEKTLGVLSVEEVKRLVYLHGAICEALRLFPPIPFETKQAIKADMLPSGHRVNSGTKILFILYAMGRSEETWGKDCLEFKPERWISEKGGIIYVPSYKXIAFNAGPRTCLGKEISFIQMKMVAAAILHKYRVRVVDHVATPSPSIVLLMKDGLKVQIAKREI

SEQ ID NO: 159 - protein, 509 aa, Triticum aestivum
  misc_feature (1)..(509): Ceres CLONE ID no. 770598
  misc_feature (1)..(509)
  Functional Homolog of CDNA ID no. 36531424at SEQ ID no. 151with e-value of 1.5E-123 and percent identity of 47.90
MAFVSFLELSLSLLCFVVFYYFHARSKRKNPVIPLEWPLVGMLPALLANLPRLHDWVTSLLTASPLNFRFVGPPRSGMELFLTSDPANVRHVFTSNFANYPKGPEFAEIMDILGGGIFNADGDSWRRQRAKAQLLMSGPRFRAFVTRCSRRKVERDLLPLLAHVAGGGTGVCDLQDVFLRLTFDTTTTLVFGVDPGCLAIGFPEVPFARAMDDAMDVLLVRNVLPPSWWKLVRWLGVGYERKMAVAWRDIDRFIGETIAKRREAVKARGGIEDSADLLSSYIDDDDEASTVVDAFLRDTTMNLMLAGRDTTGSGLSWFFYLLTRNPGVVSKILAELDTVSSSTTTPDGMVTYDPDELGRLTYLHAALCESLRLYPPVPMEHKGVVAAEALPSGHEVRPGDKVMVSLYAMGRMEAVWGKDCREFRPERWIGEDGKARYVPSYKFVSFNSGPRTCLGKDMAFVQLKAVAAAVVRNFEVEAVPGHAVEPKISIILHIKNGFKARIKRRHADA

SEQ ID NO: 160 - DNA, 1554 bp, Populus balsamifera subsp. trichocarpa
  misc_feature (1)..(1554): Ceres GDNA ANNOT ID no. 1450731
atggcaattcttgaatactttcacatcattatagcacttgtttgcatacttcttttctgccattggtgtcggaacactgttaccccggtcactaactggcctgtggtaggaatgctaccagggcttcttttcaaggcacaaaatatccatgaatatgcaacccagcttctgaaacaaagtggaggtactttcgaatttaaaggtccttggtttgctaacatgaacattttgctcactgctgatcctcttaatgttcgccatatttcaaccacaaacttcgtcaactacccgaaggggcccgagtacaagaagatttttgagccttatggagatggagttcttaattcagattttgaatcatggaaatccttccgtaaattgattcattctatgattaaggacaacaagttccaggtgtctctcgagagatctttgcgagaaaagatagtcgaaggtctaatcccggttctagagcatgcatcaagacaagaaatagaattggacatgcaagatgtattccagcgtttcacctttgataatatctgcctcctggttttaggctttgatccacagagcctctctgttgatttaccagaaattgcttataaaacagcatttgatgatgtagaggaggctgtgttttaccgacatattgtgcctgaaagcatttggaaattgcagaaatggcttaacgtaggagaagagaagaagctaagccaagccatggacaccatagataatttcttggagcagtgcatctcatcaaagaaagaagaaattcgccaacgcaaagcccaaaatatggtgcaagttgaggataatgatcaagacgactatgacttgatcaccgcttgcataaaagaaggagaagaagcggaacagatggatgcctccaaaaggactgacaaatatctaagagacatcggatttaacttcattgcagctgggaaagacaccgtaaatgcagctctaacttggttcttctggctggtggctacacaccatgaagtagaagaaaaaatcgtagaagagatcagagccaacatgaaatcgaaaggagatcatacgattaatgggatgtttttcaatctggaagagctgaataagcttgtttatctccatggagccatctgcgagactcttcggctatacccggctgtaccctttaactatagagtatctgttgaagccgacactcttcctagtggacatctggtgaaagaaaacacgaaggtgatgttctcactatactcaatgggaagcatggaagagatatggggtgatgactgcttggcattcaagccagagagatggatttcggagcgaggaggaatcattcacgttccatcttacaagtatattgcgtttaatacaggaccaaggagctgtttgggtaaagaaataaccttcattcaaatgaagacaattgcaacagccatactcttgaattttcatcttcaggtggtggaaggtcatcccgtttcaccaggtctgtctgtcatgctgcatatgaagcatggtttgaagcttagggtcaccaagagatgtgtttaa

SEQ ID NO: 161 - protein, 480 aa, Populus balsamifera subsp. trichocarpa
  misc_feature (1)..(480): Ceres GDNA ANNOT ID no. 1450731
  misc_feature (1)..(480)
  Functional Homolog of CDNA ID no. 36531424at SEQ ID no. 151with e-value of 2.2E-120 and percent identity of 46.68
MLPGLLFKAQNIHEYATQLLKQSGGTFEFKGPWFANMNILLTADPLNVRHISTTNFVNYPKGPEYKKIFEPYGDGVLNSDFESWKSFRKLIHSMIKDNKFQVSLERSLREKIVEGLIPVLEHASRQEIELDMQDVFQRFTFDNICLLVLGFDPQSLSVDLPEIAYKTAFDDVEEAVFYRHIVPESIWKLQKWLNVGEEKKLSQAMDTIDNFLEQCISSKKEEIRQRKAQNMVQVEDNDQDDYDLITACIKEGEEAEQMDASKRTDKYLRDIGFNFIAAGKDTVNAALTWFFWLVATHHEVEEKIVEEIRANMKSKGDHTINGMFFNLEELNKLVYLHGAICETLRLYPAVPFNYRVSVEADTLPSGHLVKENTKVMFSLYSMGSMEEIWGDDCLAFKPERWISERGGIIHVPSYKYIAFNTGPRSCLGKEITFIQMKTIATAILLNFHLQVVEGHPVSPGLSVMLHMKHGLKLRVTKRCV

SEQ ID NO: 162 - protein, 505 aa, Oryza sativa subsp. japonica
  misc_feature (1)..(505): Public GI no. 34906258
  misc_feature (1)..(505)
  Functional Homolog of CDNA ID no. 36531424at SEQ ID no. 151with e-value of 3.2E-105 and percent identity of 45.06
MELLPWLLGFVVKYPEIMASAACFLLLFCRFRRRSKRIPTNWPVVGALPAIVANAGRVHDWVTEFLRAAAMSHVVEGPWGSPGDVLITADPANVAHMFTANFGNYPKGEEFAAMFDVLGGGIFNADGESWSFQRRKAHALLSDARFRAAVAASTSRKLGGGLVPLLDGVAASGAAVDLQDVFMRLTFDLTAMFVFGVDPGCLAADFPTVPFAAAMDDAEEVLFYRHVAPVPWLRLQSYLKIGHYKKMAKAREVLDASIAELIALRRERKAADANATGDADLLTAYLACQDEIGMDGAAFDAFLRDTTLNLMVAGRDTTSSALTWFFWLLSNHPGVEARILAELRAHPPSPTGAELKRLVYLHAALSESLRLYPPVPFEHKAAARPDTLPSGAAVGPTRRVIVSLYSMGRMEAVWGKGCEEFRPERWLTPAGRFRHERSCKFAAFNVGPRTCLGRDLAFAQMKAVVAAVVPRFRVAAAAAPPRPKLSIILHMRDGLKVKVHRRQED

SEQ ID NO: 163 - DNA, 1458 bp, Arabidopsis thaliana
  misc_feature (1)..(1458): Ceres CDNA ID no. 12718491
  misc_feature (1)..(1458): Also Known As  Ceres SEEDLINE ME04591
atggttttagaaccaaacttcgttctctcatgggtcttcttatgcatagctgcaacaatctccagcacacttttcttcttccgcaagaaacatcaccgattcataacaaagaagattcagaagaaaaagaagcttcttcctggagaaatggggcttccatggattggtgaaacaatggatttctacaaagctcagaaaagcaacagagtttttgaggattttgtaaatccaaggatcatcaaacatgggaacatcttcaagacaagaatcatgggatcaccaacaatagtagtcaatggagctgaagccaataggctcatattatccaacgagtttagcttggtggtgagctcgtggccttcatcttctgttcaactaatgggcatgaactgcatcatggctaaacaaggcgagaagcatcgggtcctcagagggattgtagctaatagtcttagctacattgggttagagtccttaatacctaagctctgtgataccgttaagtttcatcatgaaaccgaatggcgaggcaaggaagagattagcctctaccgttcggcaaaagttctcactttcactgtagtatttgagtgtttgtatgggataaaagtggagattgggatgttagaggtctttgagagggttttagaaggtgttttcgctttgccggttgagtttccttgttctaagtttgctagagcaaagaaagcaaggctagagatagagacatttctagttgggaaggtcagggagaagcgaagagaaatggaaaaagagggagctgagaagccaaacacaacgcttttctcgaggctagtagaagagttgatcaaaggtgtgataaccgaagaagaggttgtagataatatggttttgctagtgtttgcagctcatgacacaacctcttacgccatgtccatgactttcaagatgttagctcagcacccaacttgtcgtgacactctccttcaagaacatgctcaaataaaagcaaacaaaggggaaggagaatatcttacagtggaagatgtgaaaaagatgaagtatagttggcaagttgttcgtgaaacaatgcgattatcccctccaatcttcggttctttcagaaaagcagtggctgatattgactatggaggatacacaatccccaaaggctggaagatactctggaccacttatggaactcattataatcctgaaatatttcaagatccaatgagttttgatccaacaagatttgataagccaatacaggcatatacatatctaccatttggaggtggaccaaggctttgtgcaggtcaccaactagccaaaatcagcattctcgttttcatgcattttgttgtgacaggttttgactggtccttagtctacccagatgagacaattagcatggatcctctcccatttccgtcccttggaatgccaatcaaaatttctcccaaggtgtcatag

SEQ ID NO: 164 - protein, 485 aa, Arabidopsis thaliana
  misc_feature (1)..(485): Ceres CDNA ID no. 12718491
  misc_feature (1)..(485): Also Known As  Ceres SEEDLINE ME04591
  misc_feature (46)..(484): Pfam Name: p450 Pfam Description: Cytochrome P450
  misc_feature: Phenotype: Late Flowering Useful for delaying flowering time
  misc_feature: Phenotype: ROSETTE LEAVES Useful for making ornamental plants with modified leaves
  misc_feature: Phenotype: Oval Shaped Useful for making plants with increased biomass and foliage
  misc_feature: Phenotype: Short Useful for making shorter plants
MVLEPNFVLSWVFLCIAATISSTLFFFRKKHHRFITKKIQKKKKLLPGEMGLPWIGETMDFYKAQKSNRVFEDFVNPRIIKHGNIFKTRIMGSPTIVVNGAEANRLILSNEFSLVVSSWPSSSVQLMGMNCIMAKQGEKHRVLRGIVANSLSYIGLESLIPKLCDTVKFHHETEWRGKEEISLYRSAKVLTFTVVFECLYGIKVEIGMLEVFERVLEGVFALPVEFPCSKFARAKKARLEIETFLVGKVREKRREMEKEGAEKPNTTLFSRLVEELIKGVITEEEVVDNMVLLVFAAHDTTSYAMSMTFKMLAQHPTCRDTLLQEHAQIKANKGEGEYLTVEDVKKMKYSWQVVRETMRLSPPIFGSFRKAVADIDYGGYTIPKGWKILWTTYGTHYNPEIFQDPMSFDPTRFDKPIQAYTYLPFGGGPRLCAGHQLAKISILVFMHFVVTGFDWSLVYPDETISMDPLPFPSLGMPIKISPKVS

SEQ ID NO: 165 - DNA, 1434 bp, Populus balsamifera subsp. trichocarpa
  misc_feature (1)..(1434): Ceres GDNA ANNOT ID no. 1443044
atgaccatacaaatatgctctttgctttcctgggctttgttttgctcaacagcaatgctcctcgccatttttttgaaacacagaaaaggctgcggcaagagtgatggaaaactaccaccaggggaaatgggacttccttggatcggtgaaacaatagagttctacagatcacaacgtgacaaccaattgttcgaagagtttgttcaaccacggatcacaaaatatggaaagatattcaaaacgaggctaatgggttctccaacaatcatcgttaatggtgctgaagctaaccggtttttcttgtccaacgaattcaagttggtagttagctcatggcctactgcatcagttcagctcatgggcataaattccatcatggaaaagcaaggggagaagcaccgatgccttcgtggaataatcgccaccagccttggccctgcagggcttgagattttagtgccaaaaatttgcgactcagttcaattgtacctagataaaaattggaatgtaagagaagagatcagtctttaccattcgaccaaagccttgacgtttactatagttttggagtgcttgctagggctcaattttgagcctggaaccctgaatacttttgagagagttttggaaggagtttttgcaccacctatttcatttcctggttccaagttttcaagagccaagaaagcaaggcgggagataaaagaaatgttgattaaagtagtaagggagaaaaggaagaagatggaaagtggtttagggggggatgaaggaatgttattttcccaattggtaagcgggatgattcgaggggagatcagtgaagaggaggttgttgataatgtggttttgctagtgtttgcagctcatgacacaacatcttttgccattgccatgaccttcaaaatgttagctgagcatccagactgccattctctcctccttcaagaacatgatgacataatgaacaagaggagatctggagaaaatctaacaatggaagacacgaagaaaatgaaatatacatggcaagttgcacgtgaaagcatgcggctttttcctcctatctttggctccttcagaaaagctattgctgacattgaatatgaaggattcacgattcccaaagggtggaaggttctgtggacaacatatggcacccactacaatgaagaatatttcaaggatcctctgacttttaatccaagaagatttgaggagccaattccaccatatgcttaccttcccttcggtggaggaccaagactttgtgcaggaaaccaactggcaaagttgaatatcctcatcttcatccactatgttgtaacgcgttacaattggtccttactctgccctggtgaacaaatcaccatggaccctctcccattcccttcccatggaatgcccatcaaagtttctctcaagtcatcttag

SEQ ID NO: 166 - protein, 459 aa, Populus balsamifera subsp. trichocarpa
  misc_feature (1)..(459): Ceres GDNA ANNOT ID no. 1443044
  misc_feature (1)..(459)
  Functional Homolog of CDNA ID no. 12718491at SEQ ID no. 164with e-value of 5.5E-163 and percent identity of 67.12
MLLAIFLKHRKGCGKSDGKLPPGEMGLPWIGETIEFYRSQRDNQLFEEFVQPRITKYGKIFKTRLMGSPTIIVNGAEANRFFLSNEFKLVVSSWPTASVQLMGINSIMEKQGEKHRCLRGIIATSLGPAGLEILVPKICDSVQLYLDKNWNVREEISLYHSTKALTFTIVLECLLGLNFEPGTLNTFERVLEGVFAPPISFPGSKFSRAKKARREIKEMLIKVVREKRKKMESGLGGDEGMLFSQLVSGMIRGEISEEEVVDNVVLLVFAAHDTTSFAIAMTFKMLAEHPDCHSLLLQEHDDIMNKRRSGENLTMEDTKKMKYTWQVARESMRLFPPIFGSFRKAIADIEYEGFTIPKGWKVLWTTYGTHYNEEYFKDPLTFNPRRFEEPIPPYAYLPFGGGPRLCAGNQLAKLNILIFIHYVVTRYNWSLLCPGEQITMDPLPFPSHGMPIKVSLKSS

SEQ ID NO: 167 - protein, 499 aa, Taxus cuspidata
  misc_feature (1)..(499): Public GI no. 64180315
  misc_feature (1)..(499)
  Functional Homolog of CDNA ID no. 12718491at SEQ ID no. 164with e-value of 3E-92 and percent identity of 41.47
MDALYKSTVAKFNEVTQLDCSTESFSIALSAIAGILLLLLLFRSKRHSSLKLPPGKLGIPFIGESFIFLRALRSNSLEQFFDERVKKFGLVFKTSLIGHPTVVLCGPAGNRLILSNEEKLVQMSWPAQFMKLMGENSVATRRGEDHIVMRSALAGFFGPGALQSYIGKMNTEIQSHINEKWKGKDEVNVLPLVRELVFNISAILFFNIYDKQEQDRLHKLLETILVGSFALPIDLPGFGFHRALQGRAKLNKIMLSLIKKRKEDLQSGSATATQDLLSVLLTFRDDKGTPLTNDEILDNFSSLLHASYDTTTSPMALIFKLLSSNPECYQKVVQEQLEILSNKEEGEEITWKDLKAMKYTWQVAQETLRMFPPVFGTFRKAITDIQYDGYTIPKGWKLLWTTYSTHPKDLYFNEPEKFMPSRFDQEGKHVAPYTFLPFGGGQRSCVGWEFSKMEILLFVHHFVKTFSSYTPVDPDEKISGDPLPPLPSKGFSIKLFPRP

SEQ ID NO: 168 - protein, 502 aa, Taxus chinensis
  misc_feature (1)..(502): Public GI no. 53759170
  misc_feature (1)..(502)
  Functional Homolog of CDNA ID no. 12718491at SEQ ID no. 164with e-value of 8.9E-92 and percent identity of 41.47
MDALYKSTVAKFNEVTQLDCSTESFSIALSSIAGILLLLLLFRSKRHSSLKLPPGKLGIPFIGESFIFLRALRSNSLEQFFDERVKKFGLVFKTSLIGHPTVVLCGPAGNRLILSNEEKLVQMSWPAQFMKLMGENSVATRRGEDHIVMRSALAGFFGPGALQSYIGKMNTEIQNHINEKWKGKDEVNVLPLVRELVFNISAILFFNIYDKQEQDRLHKLLETILVGSFALPIDLPGFGFHRALQGRATLNKIMLSLIKKRKEDLQSGSATATQDLLSVLLTFRDDKGTPLTNDEILDNFSSLLHASYDTTTSPMALIFKLLSSNPECYQKVVQEQLEILSNKEEGEEITWKDLKAMKYTWQVAQETLRMFPPVFGTFRKAITDIQYDGYTIPKGWKLLWTTYSTHPKDLYFSEPEKFMPSRFDQEGKHVAPYTFLPFGGGQRSCVGWEFSKMEILLFVHHFVKTFSSYTPVDPDEKISGDPLPPLPSKGFSIKLFPETIVN

SEQ ID NO: 169 - protein, 485 aa, Taxus x media
  misc_feature (1)..(485): Public GI no. 60459952
  misc_feature (1)..(485)
  Functional Homolog of CDNA ID no. 12718491at SEQ ID no. 164with e-value of 1.4E-86 and percent identity of 39.57
MDALKQLEVSPSILFVTLAVMAGIILFFRSKRHSSVKLPPGNLGFPLVGETLQFVRSLGSSTPQQFIEERMSKFGDVFKTSIIGHPTVALCGPAGNRLVLSNENKLVQMSWPSSMMKLIGEDCLGGKTGEQHRIVRAALTRFLGPQALQNHFAKMSSGIQRHINEKWKGKDEATVLPLVKDLVFSVASRLFFGITEEHLQEQLHNLLEVILVGSFSVPLNIPGFSYHKAIQARATLADIMTSLIEKRRNELRAGTASENQDLLSVLLTFTDERGNSLADKEILDNFSMLLHGSYDSTNSPLTMLIKVLASHPESYEKVAQEQFGILSTKMEGEEIAWKDLKEMKYSWQVVQETLRMYPPIFGTFRKAITDIHYNGYTIPKGWKLLWTTYSTQTKEEYFKDADQFKPSRFEEEGKHVTPYTYLPFGGGMRVCPGWEFAKMETLLFLHHFVKAFSGLKAIDPNEKLSGKPLPPLPVNGLPIKLYSRS

SEQ ID NO: 170 - protein, 493 aa, Taxus chinensis
  misc_feature (1)..(493): Public GI no. 38481843
  misc_feature (1)..(493)
  Functional Homolog of CDNA ID no. 12718491at SEQ ID no. 164with e-value of 6.8E-83 and percent identity of 35.64
MDALSLVNSTVAKFNEVTQLQASPAILSIALTAIAGIIVLLVITSKRRSSLKLPPGKLGLPFIGETLEFVKALRSDTLRQFVEEREGKFGRVFKTSLLGKPTVILCGPAGNRLVLSNEEKLLHVSWSAQIARILGLNSVAVKRGDDHRVLRVALAGFLGSAGLQLYIGKMSALIRNHINEKWKGKDEVNVLSLVRDLVMDNSAILFFNIYDKERKQQLHEILKIILASHFGIPLNIPGFLYRKALKGSLKRKKILSALLEKRKDELRSGLASSNQDLLSVLLSFRGDEAVLDNCFAMLDASYDTTTSQMTLILKMLSSNPECFEKVVQEQLEIASNKKEGEEITMKDIKAMKYTWQVLQESLRMLSPVFGTLRKIMNDINHDGYTIPKGWQVVWTTYSTHQKDIYFKQPDNFMPSRFEEEDGHLDAYTFVPFGGGRRACPGWEYAKVGILLFLHHFVKAFSGYTPTDPHERICGYPVPLVPIKGFPIKLIARS

SEQ ID NO: 171 - protein, 495 aa, Taxus canadensis
  misc_feature (1)..(495): Public GI no. 67633430
  misc_feature (1)..(495)
  Functional Homolog of CDNA ID no. 12718491at SEQ ID no. 164with e-value of 9.4E-80 and percent identity of 39.10
MDAMDLTVAKFKEFTQLQSSAILLTVVSGIIVIVILLLRSKRRSSLKLPPGKLGLPLIGESLSFLWALRSNTLEQFVDKRVKKYGNVFKTSLLGQPTVVLCGAAGNRLILSNQEKLLSRTVSDRVAKLTGDTSISVIAGDSHRIIRAAVAGFLGPAGLKIHIGEMSAHIRNHINQVWKGKDEVNVLSLARELVFAISASLFLNINDREEQHQLHKTLETILPGYFSVPINFPGFAFRKALEGNSKRRKHFSVLQEKRRRDLSVGLASRTQDLLSVLLAYEDDKGNPLTDEEVLDNISALIDGSYESTSSQMAMLLKLLSDHPECYEKVVQEQLEIASHKKEGEEITWKDVKAMRYTWQVMQETLRMFAPVFGPRGKAITDIHYDGYTIPKGWQLSWATYSTHQNDTYFNEPDKFMPSRFDEEGGRLAPYTFVPFGGGRRKCPGWEFAKTEILLFVHHFVKTFSAYTPIDPHESIWGRPLPPVPANGFPIKLISRS

SEQ ID NO: 172 - protein, 500 aa, Taxus cuspidata
  misc_feature (1)..(500): Public GI no. 34559857
  misc_feature (1)..(500)
  Functional Homolog of CDNA ID no. 12718491at SEQ ID no. 164with e-value of 3.7E-82 and percent identity of 34.78
MDALSLVNSTVAKFNEVTQLQASPAILSTALTAIAGIIVLLVITSKRRSSLKLPPGKLGLPFIGETLEFVKALRSDTLRQFVEEREGKFGRVFKTSLLGKPTVILCGPAGNRLVLSNEEKLLHVSWSAQIARILGLNSVAVKRGDDHRVLRVALAGFLGSAGLQLYIGKMSALIRNHINEKWKGKDEVNVLSLVRDLVMDNSAILFFNIYDKERKQQLHEILKIILASHFGIPLNIPGFLYRKALKGSLKRKKILSALLEKRKDELRSRLASSNQDLLSVLLSFRDERGKPLSDEAVLDNCFAMLDASYDTTTSQMTLILKMLSSNPECFEKVVQEQLEIASNKKEGEEITMKDIKAMKYTWQVLQESLRMLSPVFGTLRKTMNDINHDGYTIPKGWQVVWTTYSTHQKDIYFKQPDKFMPSRFEEEDGHLDAYTFVPFGGGRRTCPGWEYAKVEILLFLHHFVKAFSGYTPTDPHERICGYPVPLVPVKGFPIKLIARS

SEQ ID NO: 173 - protein, 497 aa, Picea sitchensis
  misc_feature (1)..(497): Public GI no. 59800276
  misc_feature (1)..(497)
  Functional Homolog of CDNA ID no. 12718491at SEQ ID no. 164with e-value of 8.2E-81 and percent identity of 38.46
MVWKEAVSVLQKAQELKEPPLMFTVFLASFIGLAFFFYLISNHRTKAWRGIPPGTFGWPLIGETLEFLGCQRKGNPRDFFDSRTQKYGNVFTTSLVGHPTVVFCSPEGNRFLFSNENKLVVNSWPSSVGNLFRSSLITTVGDDAKRLRRILMTFLRPEALREFVGRVDSMTKRHLAEHWIGKDEVTALPLLKRYTFSLACDLFASINNKDDLGRLWLHFMVFVKGVMQIPIDLPGTRYNKAKHAANAIRQQLGSIINERKIGLEAGNASPEQDLLSFLLSNVDEQGESLTDNEIQDNILLLLYAGHDTSSSTLTVLLKFLAENPHCYEEVLREQLDIAGSKEAGQLLEWEDLQRMKYSWRVAQEALRLFPAAQGSFRKAIKEFIYDGFTIPKGWKMYWTVNSTHRKSEYFSNPETFDPSRFEGEGPPPYTFVPFGGGPRMCPGNEFARLEILVFLHNIVKNCKWNLVNPGEKVIVDPMPAPVNGLPIKLVPHDSVYI

SEQ ID NO: 174 - protein, 493 aa, Picea sitchensis
  misc_feature (1)..(493): Public GI no. 59800274
  misc_feature (1)..(493)
  Functional Homolog of CDNA ID no. 12718491at SEQ ID no. 164with e-value of 5E-81 and percent identity of 38.25
MVWKEAVSVLQKAQELKEPPLMFTVFLASFIGLAFFFYLISNHRTKAWRGIPPGTFGWPLIGETLEFLGCQRKGNPRDFFDSRTQKYGNVFTTSLVGHPTVVFCSPEGNRFLFSNENKLVVNSWPSSVGNLFRSSLITTVGDDAKRLRRILMTFLRPEALREFVGRVDSMTKRHLAEHWIGKDEVMALPLLKRYTFSLACDLFASINTKDDLDRLWLHFMVFVKGVMQIPIDLPGTRYNKTKHAANAIRQQLGSIINERKIALEAGNASPEQDLLSFLLSNVDEQGESLTDNEIQDNILLLLYAGHDTSSSTLTVLLKFLAENPHCYEEVLREQLNIAGSKEEGQLLEWEDLQRMKYSWRVAQEALRLFPAVQGSFRKAIKEFIYDGFTIPKGWKLHWTVNSTHQKSEYFSNPEKFDPSRFEGEGPPPYTFVPFGGGPRMCPGNEFARMEILIFLHNIVKNFNWNLVNPLEKVIVDPMPAPVNGLPIKLVPHD

SEQ ID NO: 175 - protein, 498 aa, Oryza sativa subsp. japonica
  misc_feature (1)..(498): Public GI no. 50937811
  misc_feature (1)..(498)
  Functional Homolog of CDNA ID no. 12718491at SEQ ID no. 164with e-value of 2E-74 and percent identity of 33.62
MALAVVVVALLVAFLTPLAVYLAGRSTRTKPPPRRNLPPGSLGLPLVGQSLSLLRAMRRNTAERWLQGRIDRYGPVSKLSLFGAPTVLLAGPAANKAVFLSEALAPKQPRSLAAIIGRRNMLELVGDDHRRVRGALAQFLRPEMLRRYVGRIDGEVRRHLAGRWAGRRTVAVLPLMKLLTLDVIATLLFGLARGAVRERLAAAFADMLEGLWAVPLDLPFTAFRRSLRASARARRLLAATVREKKANLEQGESSPSDDLISYLVSLRDGDGGGGRPLLTEEEIIDNSIVCLTAGHDTSAILLTFMVRHLADDPAILAAMVQEHEEIARSKRDGEALTWEDVARMKLTWRVAQETLRMVPPVFGSFRRALEDVELDGGYVIPKGWQVFWAPCVTHMDPAIYHDPDKFDPSRFDAQAAASAPPPYSFVAFGGGPRICPGMELARVETLVTMHYLVRHFRWRLCCGGEENTFVRDPLPSPANGLPVELDHIAPLRCDEFNS

SEQ ID NO: 176 - protein, 495 aa, Eschscholzia californica
  misc_feature (1)..(495): Public GI no. 63108254
  misc_feature (1)..(495)
  Functional Homolog of CDNA ID no. 12718491at SEQ ID no. 164with e-value of 3.4E-15 and percent identity of 35.20
MEEMKFLIMNNPWVLFATSATLLISIFLFFRRKSPNMAWPEGPKTLPIIGNMHLLGGTALQVVLYNLAKVHGRVMTIWIGSWRPVIVVSDIEQAWEVLVNKSSDYSARDMPDITKIVTADWRTISTSDSGPHWSNLRKGLQNIAISPNNLAAQFQFQEKDIIKMIQILEQEAKDNNGIVKPLDHLKKATIRLISRLVFGRDFEEDKYVEDMHHAIEELIRISGYARLAEAFYYAKYLPSHRKAVRYVEELKQIVKNLIRPFLSVNPPTNTYLHFLRSQNYDEEVVIFAIFETYLLGVDSTSSTTAWALAYLVREPSVQDRLHQELDHFAKQNDRKILKVEDMNKLQYLQAVIKETMRMKPIAPLAIPHKACKDTSLMGNKINKGTRVMVNLYALHHNKNVFNDPFKFMPERFLKVDNQDAKGKAMEQSLLPFSAGMRICAGMELGKLQFSFALANLIFAFKWSCVDDGVLPDMSDELGFVLLMKTPLKARINPRN

SEQ ID NO: 177 - protein, 483 aa, Nicotiana tabacum
  misc_feature (1)..(483): Public GI no. 45260636
  misc_feature (1)..(483)
  Functional Homolog of CDNA ID no. 12718491at SEQ ID no. 164with e-value of 6.5E-62 and percent identity of 31.91
MDFIIYLFLSFSISLITFLLLRAAAAAHFRRRKTRLPPGTLGLPFIGETLQLISAYKTENPEPFIDDRVSKYGNIFTTHIFGEPTVFSTDAETNRFILQNEGRPFESSYPSSLQNLLGKHSLLLMRGSLHKRMHSLTMSFANSSILKDHLLADIDRLVRLNLDSWTGRVFLMEEAKKITFNLTVKQLMSLDPCEWTEKLMKEYMLVIEGFFTIPLPFFSSTYRKAIQARRKVAEALGLVVKERRKERGGGERLKNDMLEALFEGDGVEGFSDEVIVDFMLALLVAGYETTSTIMTLAVKFLTETPHALSLLKEEHEEIRLRKGDVESLLWEDYKSMPFTQCVVNETLRVGNIISGVFRRTMTDINIKGYTIPKGWKVFACFRAVHLDHEHFKDARTFDPWRWQSNAGSTSSPNVFTPFGGGPRRCPGYELARVELSVFLHHLVTRHSWVPAEPDKLVFFPTTRMQKRYPIIVQRRSLFDPCKE

SEQ ID NO: 178 - DNA, 1900 bp, Arabidopsis thaliana
  misc_feature (1)..(1900): Ceres CDNA ID no. 12370997
  misc_feature (1)..(1900): Also Known As  Ceres SEEDLINE ME04611
cctttcgtcttaaaccccacagcaaaaagccactctcctttctctctctctcttgttcctctgcatccatggccaccaagctcgacaccagtagcttacttttggccctcttgtccaaatgtagcctccttactcaaaccaatcttgctctctctctcctcgtagcctccctagcttctctcgctctttctctcttcttctggtctcatcccggaggacccgcatggggaaagtacttcctccaccgccgccgtcaaaccaccgtgatacccgggccaagaggcttaccttttgtcggaagcatgtctctcatgtcaaacactctggctcaccgttgcatagccgcaaccgcagagaaatttagagccgaacggttaatggcgtttagtttgggagaaactcgcgtgatcgtcacgtgcaatcctgatgtagctaaagagattctaaacagtccggttttcgctgaccgcccggttaaggaatcagcttattccctcatgtttaaccgtgctatcggtttcgctccttacggcgtttactggcgaaccttgagaaaaatcgcgtctaatcatcttttcagcccgaaacagattaaacgttccgaaacgcagagaagcgtgatcgcgaatcaaatcgtgaagtgtctcacaaaacagagtaacaccaaaggtctctgtttcgcacgtgacttgatcaaaacggcatcgcttaataacatgatgtgctctgttttcggaaaagaatacgagcttgaggaagagcatgaagaagtgagtgagctacgtgaattggtggaagaaggttatgatttactcggtacactgaattggaccgatcatctcccatggctctctgaatttgatcctcaaagaatccggtctagatgctctaatctcgtcccaaaagtaaaccggtttgtgaaccggattatctctgaccaccgtgaacaaactcgtgactcaccgagtgacttcgttgacgtattgctctctctcgatggtcctgataaattatccgaccctgatatcatcgccgttctatgggaaatgatattcagaggaactgacacggtggctgttttgatcgagtggattcttgctaggatggtccttcatccagatattcaatcgacggttcacaatgagcttgatcaaatcgtgggacgatcaagggctgtcgaagagtctgacgtggtgtctctagtatatctaacggctgtggtgaaagaagtcttgaggcttcacccgccaggcccactactctcatgggcccgtttagcaatcacagacacgatcatcgacggtcgtcgtgttccggcggggaccaccgcaatggtgaacatgtgggctattgcacacgatccacacgtgtgggagaatccgttggagtttaaacccgaacgttttgtagccaaggaaggtgaggttgagttctcggttcttgggtctgatttgaggcttgcaccgttcgggtccggtcgtcgggtttgccccgggaagaatcttggtttgaccaccgtgacgttttggactgcgacgcttttgcatgagtttgaatggctgacgccgtccgatgagaagaccgttgacttgtccgagaaactgaggctctcgtgtgagatggctaatcctcttgctgctaaattacgccccaggcgcagttttagtgtatgataagggtaaggctatacacagatacagtggtaactaaagcgaaggaaaattagtgtgaatttaaagcaaaagaataaaataaagaacaaagaaagtaaaggaaacaaaaaaaaagaatcatacaaaaaatactaataagaatggtaatgaagcttttatattaaactaacatcttgatacgtgttgtatatatgatgaaaacattaatgtcacaaagaaaagttaat

SEQ ID NO: 179 - protein, 534 aa, Arabidopsis thaliana
  misc_feature (1)..(534): Ceres CDNA ID no. 12370997
  misc_feature (1)..(534): Also Known As  Ceres SEEDLINE ME04611
  misc_feature (67)..(528): Pfam Name: p450 Pfam Description: Cytochrome P450
  misc_feature: Phenotype: Late Flowering Useful for delaying flowering time
  misc_feature: Phenotype: Dark Green Useful for increasing chlorophyll and photosynthetic capacity
  misc_feature: Phenotype: INFLORESCENCE Useful for making ornamental plants with modified flowers
  misc_feature: Phenotype: ROSETTE LEAVES Useful for making ornamental plants with modified leaves
  misc_feature: Phenotype: Glossy Useful for making plants with enhanced abiotic stress tolerance
  misc_feature: Phenotype: Oval Shaped Useful for making plants with increased biomass and foliage
  misc_feature: Phenotype: Short Useful for making shorter plants
  misc_feature: Phenotype: Strong Useful for making stronger plants
  misc_feature: Phenotype: Tall Useful for making taller plants and plants with longer inflorescences
  misc_feature: Phenotype: Reduced fertility Useful for sterility, genetic confinement systems
MATKLDTSSLLLALLSKCSLLTQTNLALSLLVASLASLALSLFFWSHPGGPAWGKYFLHRRRQTTVIPGPRGLPFVGSMSLMSNTLAHRCIAATAEKFRAERLMAFSLGETRVIVTCNPDVAKEILNSPVFADRPVKESAYSLMFNRAIGFAPYGVYWRTLRKIASNHLFSPKQIKRSETQRSVIANQIVKCLTKQSNTKGLCFARDLIKTASLNNMMCSVFGKEYELEEEHEEVSELRELVEEGYDLLGTLNWTDHLPWLSEFDPQRIRSRCSNLVPKVNRFVNRIISDHREQTRDSPSDFVDVLLSLDGPDKLSDPDIIAVLWEMIFRGTDTVAVLIEWILARMVLHPDIQSTVHNELDQIVGRSRAVEESDVVSLVYLTAVVKEVLRLHPPGPLLSWARLAITDTIIDGRRVPAGTTAMVNMWAIAHDPHVWENPLEFKPERFVAKEGEVEFSVLGSDLRLAPFGSGRRVCPGKNLGLTTVTFWTATLLHEFEWLTPSDEKTVDLSEKLRLSCEMANPLAAKLRPRRSFSV

SEQ ID NO: 180 - DNA, 1608 bp, Populus balsamifera subsp. trichocarpa; identical to SEQ ID NO: 135
  misc_feature (1)..(1608): Ceres GDNA ANNOT ID no. 1471370

SEQ ID NO: 181 - protein, 456 aa, Populus balsamifera subsp. trichocarpa
  misc_feature (1)..(456): Ceres GDNA ANNOT ID no. 1471370
  misc_feature (1)..(456)
  Functional Homolog of CDNA ID no. 12370997at SEQ ID no. 179with e-value of 8.7E-181 and percent identity of 76.61
MKLMTSLAHHKIAAAADACKARRLMAFSLGDTRVIVTCNPDVAKEILNSSVFADRPVKESAYSLMFNRAIGFAPYGVYWRTLRKIASTHLFCPKQIKAAESQRLQIASQMVSTFNDREKSSFSVREVLKRASLNNMMCSVFGREYKLDSFNNEVEELRALVEEGYDLLGTLNWSDHLPWLADFDPQKIRFRCSNLVPKVNRFVSRIIAEHRALTRSENPDFVDVLLSLQGHDKLSDSDMIAVLWEMIFRGTDTVAVLIEWILARMVLHPDVQSKVHDELYKVVGRSRAVAESDITAMVYLQAVVKEVLRLHPPGPLLSWARLAITDTTIDGYHVPKGTTAMVNMWAISRDPEFWEDPLEFMPERFVVTKEDVLEFSVLGSDLRLAPFGSGRRTCPGKTLGITTVTFWVASLLHEYEWVPGEENNVDLSEVLRLSCEMANPLTVKVRPRRSSQSPLY

SEQ ID NO: 182 - DNA, 1635 bp, Populus balsamifera subsp. trichocarpa; identical to SEQ ID NO: 139
  misc_feature (1)..(1635): Ceres GDNA ANNOT ID no. 1444471

SEQ ID NO: 183 - protein, 513 aa, Populus balsamifera subsp. trichocarpa; identical to SEQ ID NO: 140
  misc_feature (1)..(513): Ceres GDNA ANNOT ID no. 1444471
  misc_feature (1)..(513)
  Functional Homolog of CDNA ID no. 12370997at SEQ ID no. 179with e-value of 1E-193 and percent identity of 74.24

SEQ ID NO: 184 - DNA, 1485 bp, Populus balsamifera subsp. trichocarpa
  misc_feature (1)..(1485): Ceres GDNA ANNOT ID no. 1438451
  misc_feature (1)..(1485)
  Functional Homolog of CDNA ID no. 12370997at SEQ ID no. 179with e-value of 6.3E-178 and percent identity of 73.32
atggctttgtgttactgggtgtaccctggaggccctgcctggggtaattatttgcgcaagaaaggaattagctgttcaagagccaagatgattccagggcctagagggtttccagtgataggaagcatgaacctcatggttaacttggctcaccacaagcttgctgctgcagcgaaggcttttaaagcagaaagacttatggcttttagcttgggagagactaaggtcattatcacatgcaatcctgatgtagccaaagaaatcttgaacagttcagtctttgctgatcgtccagttaaagagtctgcctatcaactcatgtttaatagagctattggttttgctccttatggggtttactggagaactctaaggagaattgcagcaactcatcttttttgtcctaaacaaatcagctctactgagtcgcaaagattcaatattgcttctcaaatggtatccgcaatagcaagtcaaggtggagattacttttgtgttcgaggcatactaaagaaagcttcactcaacaacatgatgtgctcagtttttggtcgtaaatatgatctgggctcatcaaatagtgaaactgaagagcttagaaggcttgttgatgaaggttatgatcttctagggaaacttaattggtctgatcatcttccttggcttgcaaatttagaccttcaaagaatcaggtttaggtgctccaatttggttcctaaagtgaaccggtttgtgaaccgggttattgaagaacatagagaggaccagactggccaaagaagaaatgactttgtcgatgttttactctctcttcatggaccggacaagttatcacaccatgatatgattgccgttctctgggagatgatttttagaggaacagataccgtggcagttttgatagagtggatactagcaaggatggtacttcaccgtgatatccaatcaaaggtgcatgatgagctcgatcaagttgtgggaagatcaaggccgttgatggaagcagacattcagtcaatggtttacctgcctgcagttgtgaaagaagttctgaggttgcacccaccaggcccactactgtcgtgggcccgtttagcaatcacggacactaatgtggatggatatgatgttccagcagggaccacagctatggttaatatgtgggccataacaagggacccacaagtttgggcgaaccctctaaggttcttgccagagagatttttgtgcaaggatgctactgctgacgtggaattctctgtgtccgggtctgaccttaagctggctccgtttgggtcgggtcggaggacttgcccgggaaaggctctgggtttggccacggttagcttttgggtcggggttttgttgcacgagttcgagtgggtgcaatgtgatcatgagccggtggatctctcagaagtgctaaggttatcttgtgagatgtctaacccacttacaatcaaagtgaatccaaggagaagatga

SEQ ID NO: 185 - protein, 465 aa, Populus balsamifera subsp. trichocarpa
  misc_feature (1)..(465): Ceres GDNA ANNOT ID no. 1438451
  misc_feature (1)..(465)
  Functional Homolog of CDNA ID no. 12370997at SEQ ID no. 179with e-value of 6.3E-178 and percent identity of 73.32
MIPGPRGFPVIGSMNLMVNLAHHKLAAAAKAFKAERLMAFSLGETKVIITCNPDVAKEILNSSVFADRPVKESAYQLMFNRAIGFAPYGVYWRTLRRIAATHLFCPKQISSTESQRFNIASQMVSAIASQGGDYFCVRGILKKASLNNMMCSVFGRKYDLGSSNSETEELRRLVDEGYDLLGKLNWSDHLPWLANLDLQRIRFRCSNLVPKVNRFVNRVIEEHREDQTGQRRNDFVDVLLSLHGPDKLSHHDMIAVLWEMIFRGTDTVAVLIEWILARMVLHRDIQSKVHDELDQVVGRSRPLMEADIQSMVYLPAVVKEVLRLHPPGPLLSWARLAITDTNVDGYDVPAGTTAMVNMWAITRDPQVWANPLRFLPERFLCKDATADVEFSVSGSDLKLAPFGSGRRTCPGKALGLATVSFWVGVLLHEFEWVQCDHEPVDLSEVLRLSCEMSNPLTIKVNPRRR

SEQ ID NO: 186 - DNA, 1596 bp, Populus balsamifera subsp. trichocarpa
  misc_feature (1)..(1596): Ceres GDNA ANNOT ID no. 1447690
atggaaacacaaatagacagcttttgggtattggctctagtttccaaatgcaaagccttttcctctcaagaccccatcttccttcttctttctcttttcttggcttggctagccattgctttgtgctactgggtttaccctggaggccccgcctggggcaaatattggctcaaaagagcaacctgctcgaaagccaagatgattccgggacctagagggtttccagtgataggaagcatgaacctcatggtaaacttggctcaccacaagcttgctgctgcagccaagactcttaaagcaaaaagactcatggcttttagcatgggagagactagggttattatcacatgcaatcctgatgtagccaaagacatcttgaacagttcagtatttgctgatcgtccagttaaagagtctgcctatcagctcatgtttaatagagctattggttttgctccctatggggtttattggagaactctaaggagaattgcagcaacccatcttctttgtcctaaacaaatcagctctacagagccacagagactcgatattgcttctcaaatggtatcagtaatggcatgtcaaggtggagattactttcgtgttcgagacatactgaggaaagcttcactgaacaacatgatgtgctcagtttttggtcgtaaatatgatctaggcacatcaaataatgaaattgaggaacttggaggacttgttgatgaaggttatgatcttctagggaagcttaactggtctgatcatctaccttggcttgcaaatttcgaccttcaaaaaatcaggttcaggtgctccaatttggttcctaaagtgaaccggtttgtgaaccgggttattcaagaacatagagaggaccaaagtggccaaagaagaaatgactttgttgatgttctgctctctcttcatggaccggacaagttatcagaccatgacatggttgctgttctttgggagatgatttttagaggaacagatacagtggcagttctgatagagtggatactagccaggatgatacttcaccctgatatccaatcaaaggtgcatgatgagcttgatcaagttgcgggaagatcaaggccgttgatggaagcagacatacgatcaatggtttacctgccggcggttgtgaaagaggttctaaggttacacccaccggggccactcttgtcatgggcgcgtttagcaatcacggacactgatgttgatggatatgatgtgccagcggggaccacagctatggttaatatgtgggccataacaagggacccgcaagtttgggtggacccactaaagttctcgccagagagatttttgagcaaggaagtcactgctgacgtggagttctctgtgtcagggtctgacctcaggctggctccattcgggtcgggtcgtaggacttgcccgggaaggacactgggtttggccaccgttagcttctgggttgggagtttgttgcatgagtttgagtgggcgcggtgtggccatgagccggtggacctctctgaagtgttgaggttgtcttgtgaaatggccaaaccactcacagtcaaggtgaatccgaggagaagataa

SEQ ID NO: 187 - protein, 465 aa, Populus balsamifera subsp. trichocarpa
  misc_feature (1)..(465): Ceres GDNA ANNOT ID no. 1447690
  misc_feature (1)..(465)
  Functional Homolog of CDNA ID no. 12370997at SEQ ID no. 179with e-value of 5.8E-175 and percent identity of 72.17
MIPGPRGFPVIGSMNLMVNLAHHKLAAAAKTLKAKRLMAFSMGETRVIITCNPDVAKDILNSSVFADRPVKESAYQLMFNRAIGFAPYGVYWRTLRRIAATHLLCPKQISSTEPQRLDIASQMVSVMACQGGDYFRVRDILRKASLNNMMCSVFGRKYDLGTSNNEIEELGGLVDEGYDLLGKLNWSDHLPWLANFDLQKIRFRCSNLVPKVNRFVNRVIQEHREDQSGQRRNDFVDVLLSLHGPDKLSDHDMVAVLWEMIFRGTDTVAVLIEWILARMILHPDIQSKVHDELDQVAGRSRPLMEADIRSMVYLPAVVKEVLRLHPPGPLLSWARLAITDTDVDGYDVPAGTTAMVNMWAITRDPQVWVDPLKFSPERFLSKEVTADVEFSVSGSDLRLAPFGSGRRTCPGRTLGLATVSFWVGSLLHEFEWARCGHEPVDLSEVLRLSCEMAKPLTVKVNPRRR

SEQ ID NO: 188 - DNA, 1599 bp, Populus balsamifera subsp. trichocarpa
  misc_feature (1)..(1599): Ceres GDNA ANNOT ID no. 1491278
atggaaacacaaatagacagcttttgggtattggtccttgtttccaaatgcaaagccttttctgctcaaaaccccatcttccttcttgtttctgttttcctggcctggctagccatggctttgtgttactgggtgtaccctggaggccctgcctggggtaattatttgcgcaagaaaggaattagctgttcaagagccaagatgattccagggcctagagggtttccagtgataggaagcatgaacctcatggttaacttggctcaccacaagcttgctgctgcagcgaaggcttttaaagcagaaagacttatggcttttagcttgggagagactaaggtcattatcacatgcaatcctgatgtagccaaagaaatcttgaacagttcagtctttgctgatcgtccagttaaagagtctgcctatcaactcatgtttaatagagctattggttttgctccttatggggtttactggagaactctaaggagaattgcagcaactcatcttttttgtcctaaacaaatcagctctactgagtcgcaaagattcaatattgcttctcaaatggtatccgcaatagcaagtcaaggtggagattacttttgtgttcgaggcatactaaagaaagcttcactcaacaacatgatgtgctcagtttttggtcgtaaatatgatctgggctcatcaaatagtgaaactgaagagcttagaaggcttgttgatgaaggttatgatcttctagggaaacttaattggtctgatcatcttccttggcttgcaaatttagaccttcaaagaatcaggtttaggtgctccaatttggttcctaaagtgaaccggtttgtgaaccgggttattgaagaacatagagaggaccagactggccaaagaagaaatgactttgtcgatgttttactctctcttcatggaccggacaagttatcacaccatgatatgattgccgttctctgggagatgatttttagaggaacagataccgtggcagttttgatagagtggatactagcaaggatggtacttcaccgtgatatccaatcaaaggtgcatgatgagctcgatcaagttgtgggaagatcaaggccgttgatggaagcagacattcagtcaatggtttacctgcctgcagttgtgaaagaagttctgaggttgcacccaccaggcccactactgtcgtgggcccgtttagcaatcacggacactaatgtggatggatatgatgttccagcagggaccacagctatggttaatatgtgggccataacaagggacccacaagtttgggcgaaccctctaaggttcttgccagagagatttttgtgcaaggatgctactgctgacgtggaattctctgtgtccgggtctgaccttaagctggctccgtttgggtcgggtcggaggacttgcccgggaaaggctctgggtttggccacggttagcttttgggtcggggttttgttgcacgagttcgagtgggtgcaatgtgatcatgagccggtggatctctcagaagtgctaaggttatcttgtgagatgtctaacccacttacaatcaaagtgaatccaaggagaagatga

SEQ ID NO: 189 - protein, 494 aa, Populus balsamifera subsp. trichocarpa
  misc_feature (1)..(494): Ceres GDNA ANNOT ID no. 1491278
  misc_feature (1)..(494)
  Functional Homolog of CDNA ID no. 12370997at SEQ ID no. 179with e-value of 7.3E-184 and percent identity of 71.46
MALCYWVYPGGPAWGNYLRKKGISCSRAKMIPGPRGFPVIGSMNLMVNLAHHKLAAAAKAFKAERLMAFSLGETKVIITCNPDVAKEILNSSVFADRPVKESAYQLMFNRAIGFAPYGVYWRTLRRIAATHLFCPKQISSTESQRFNIASQMVSAIASQGGDYFCVRGILKKASLNNMMCSVFGRKYDLGSSNSETEELRRLVDEGYDLLGKLNWSDHLPWLANLDLQRIRFRCSNLVPKVNRFVNRVIEEHREDQTGQRRNDFVDVLLSLHGPDKLSHHDMIAVLWEMIFRGTDTVAVLIEWILARMVLHRDIQSKVHDELDQVVGRSRPLMEADIQSMVYLPAVVKEVLRLHPPGPLLSWARLAITDTNVDGYDVPAGTTAMVNMWAITRDPQVWANPLRFLPERFLCKDATADVEFSVSGSDLKLAPFGSGRRTCPGKALGLATVSFWVGVLLHEFEWVQCDHEPVDLSEVLRLSCEMSNPLTIKVNPRRR

SEQ ID NO: 190 - protein, 536 aa, Glycine max
  misc_feature (1)..(536): Ceres CLONE ID no. 624225
  misc_feature (1)..(536)
  Functional Homolog of CDNA ID no. 12370997at SEQ ID no. 179with e-value of 0 and percent identity of 68.64
MSTHIESLWVLALASKCIQENIAWSLLIIMVTLWLTMTFFYWSHPGGPAWGKYYYFNYWKKTTSTNTNINLKMIIPGPRGYPFIGSMSLMTSLAHHRIAAAGEACNATRLMAFSMGDTRAIVTCNPDVAKEILNSSTFADRPIKESAYSLMFNRAIGFAPYGVYWRTLRRIAATHLFCPKQIKASELQRAEIAAQMTNSFRNHRCSGGFGIRSVLKRASLNNMMWSVFGQKYNLDEINTAMDELSMLVEQGYDLLGTLNWGDHIPFLKDFDLQKIRFTCSKLVPQVNRFVGSIIADHQADTTQTNRDFVHVLLSLQGPDKLSHSDMIAVLWEMIFRGTDTVAVLIEWILARMVLHPEVQRKVQEELDAVVRGGALTEEVVAATAYLAAVVKEVLRLHPPGPLLSWARLAITDTTIDGYHVPAGTTAMVNMWAIARDPEVWLDPLEFKPERFMGLENEFSVFGSDLRLAPFGSGRRTCPGKTLGLSTVTFWVAWLLHEFEWLPSDEAKVDLTEVLRLSCEMANPLIVKVRPRHGLST

SEQ ID NO: 191 - protein, 523 aa, Glycine max
  misc_feature (1)..(523): Public GI no. 2739008
  misc_feature (1)..(523)
  Functional Homolog of CDNA ID no. 12370997at SEQ ID no. 179with e-value of 0 and percent identity of 67.24
MTSHIDDNLWIIALTSKCTQENLAWVLLIMGSLWLTMTFYYWSHPGGPAWGKYYTYSPPLSIIPGPKGFPLIGSMGLMTSLAHHRIAAAAATCRAKRLMAFSLGDTRVIVTCHPDVAKEILNSSVFADRPVKESAYSLMFNRAIGFASYGVYWRSLRRIASNHLFCPRQIKASELQRSQIAAQMVHILNNKRHRSLRVRQVLKKASLSNMMCSVFGQEYKLHDPNSGMEDLGILVDQGYDLLGLFNWADHLPFLAHFDAQNIRFRCSNLVPMVNRFVGTIIAEHRASKTETNRDFVDVLLSLPEPDQLSDSDMIAVLWEMIFRGTDTVAVLIEWILARMALHPHVQSKVQEELDAVVGKARAVAEDDVAVMTYLPAVVKEVLRLHPPGPLLSWARLSINDTTIDGYHVPAGTTAMVNTWAICRDPHVWKDPLEFMPERFVTAGGDAEFSILGSDPRLAPFGSGRRACPGKTLGWATVNFWVASLLHEFEWVPSDEKGVDLTEVLKLSSEMANPLTVKVRPRRG

SEQ ID NO: 192 - protein, 552 aa, Triticum aestivum; identical to SEQ ID NO: 143
  misc_feature (1)..(552): Ceres CLONE ID no. 779234
  misc_feature (1)..(552)
  Functional Homolog of CDNA ID no. 12370997at SEQ ID no. 179with e-value of 0 and percent identity of 65.34

SEQ ID NO: 193 - protein, 551 aa, Oryza sativa subsp. japonica
  misc_feature (1)..(551): Public GI no. 50948231
  misc_feature (1)..(551)
  Functional Homolog of CDNA ID no. 12370997at SEQ ID no. 179with e-value of 0 and percent identity of 63.20
MDMDSSPSTQDCGGWLLYVSLAAKCGGDPCRVVGFVAVAVVAFAVTSLLHWLSPGGPAWGRYWWNRRGGLGIAAAIPGPRGLPVLGSMSLMAGLAHRKLAAAAGGSPARRRLMALSLGETRVVVTADPGVARELLASAAFADRPVKESAYGMLFHRAIGFAPYGTYWRALRRVASTHLFSPRQVSASAAQRAVIARQMVEAMRSAAAAAAGGGVAARPFLKRASLHNVMWSVFGRKYELAAPESEETAELRSMVDEGYDLLGQLNWSDHLPWLAPFDLKKTRSRCSSLVPRVNRFVTRIIDEHRARLSLAVDAAVDFTDVLLSLHGGDKLSDADMVAVLWEMIFRGTDTVAVLIEWVAARLVLHQDVQARVHDELDRVVGSDRAVTESDASKLVYLQAVIKEVLRLHPPGPLLSWARLATSDVHVGGFLIPSGTTAMVNMWAITHDPAVWPDPNEFKPERFVAGPSSDQATEFPIMGSDLRLAPFGSGRRSCPGKSLAIATVGFWVATLLHEFDWLPLSDKSRGVDLSEVLKLSCEMATPLEARLRPRRKV

SEQ ID NO: 194 - protein, 553 aa, Oryza sativa subsp. japonica
  misc_feature (1)..(553): Public GI no. 50725143
  misc_feature (1)..(553)
  Functional Homolog of CDNA ID no. 12370997at SEQ ID no. 179with e-value of 0 and percent identity of 62.81
MATPEDTGSWLLYLSLAAKCSGDGDGQPHRLLGFVVVCAVAGLVTCLLHWSFPGGPAWGRWWWTRRRRRGSPCGVAAVPGLRGLPVIGSMWLMTGLAHRKLAAAAEAAGAGRLMALSLGETRVVVAAHPDVAREILHGAAFADRPVKESAYGLLFHRAIGFAPHGAYWRALRRVASTHLFSPWQVAASAPQRAVIARQMVRAIKLQQRSRSGDSAAGAAVEVRRVLRRASLHNVMWSVFGRRYELQLDPGKESDEVRELRALVDEGYDLLGQLNWSDHLPWLARFDLQSTRARCSRLVPRVNRFVTRIIDEHRSSAPVAAAIDFTDVLLSLQGSDKLADSDMVAVLWEMVFRGTDTVAVLIEWVLARLVLQQDVQARVHDELGRVVGLDRDVTESDTASLVYLHAVIKETLRLHPPGPLLSWARLATSDVHVDGYLIPAGTTAMVNMWAIAHDPDVWAEPMEFRPERFIGKAAEFSVMGSDLRLAPFGSGRRSCPGKSLAMATVAFWLATLLHEFALLPSPDPAHGVDLSEVLRLSCEMATPLAVTAWPRRVV

SEQ ID NO: 195 - protein, 546 aa, Zea mays; identical to SEQ ID NO: 144
  misc_feature (1)..(546): Ceres CLONE ID no. 1551657
  misc_feature (1)..(546)
  Functional Homolog of CDNA ID no. 12370997at SEQ ID no. 179with e-value of 5.7E-160 and percent identity of 62.60

SEQ ID NO: 196 - protein, 557 aa, Zea mays; identical to SEQ ID NO: 148
  misc_feature (1)..(557): Ceres CLONE ID no. 1601442
  misc_feature (1)..(557)
  Functional Homolog of CDNA ID no. 12370997at SEQ ID no. 179with e-value of 9.7E-28 and percent identity of 55.71

SEQ ID NO: 197 - protein, 543 aa, Zea mays; identical to SEQ ID NO: 147
  misc_feature (1)..(543): Ceres CLONE ID no. 1600726
  misc_feature (1)..(543)
  Functional Homolog of CDNA ID no. 12370997at SEQ ID no. 179with e-value of 4.3E-76 and percent identity of 56.51

SEQ ID NO: 198 - protein, 553 aa, Pinus radiata; identical to SEQ ID NO: 149
  misc_feature (1)..(553): Public GI no. 5921925
  misc_feature (1)..(553)
  Functional Homolog of CDNA ID no. 12370997at SEQ ID no. 179with e-value of 0 and percent identity of 56.50

SEQ ID NO: 199 - protein, 515 aa, Oryza sativa subsp. japonica
  misc_feature (1)..(515): Public GI no. 22758273
  misc_feature (1)..(515)
  Functional Homolog of CDNA ID no. 12370997at SEQ ID no. 179with e-value of 0 and percent identity of 56.35
MATSFVYLAIFACLAWAGTALLYWAHPGGPAWGKYRRARGQSPRCSIPGPKGLPVVGSLGLMSGLAHCSLAAEAARRPGAKRLMALSLGPVRAVVTSHPDVAKEILDNPAFADRPLNHAAYGLMFHRSIGFAEHGPYWRALRRVAAGHLFGPRQVDAFAPYRARVAGGVVAALRGAGGEAAVQVRGVLRRASLYYIMRFVFGKEYDVSRGAPESGEEVEELLEMVHEGYDLLGKENWCDYFPGLAAVDPQGVGARCAELMPRVNRFVRGIIQEHRGKAIAGGEARDFVDILLSLQESEGLADADIAAVLWEMIFRGTDAMAVLMEWTLARVVLHPDVQANVHRELDAVVGRSNTVAESAVPSLPYLQALLKEALRMHPPGPLLSWRHRAISDTYVDGHLVPAGTTAMVNQWAMSRDADVWDAPLEFQPERFLPGGKAHGVSVLGADGRLVPFGSGRRSCPGKSLAMTTVTAWMATLLHEFEWTPASGAVDLSEVLRLSCEMAVPLEVRVSARRNV

SEQ ID NO: 200 - DNA, 1794 bp, Arabidopsis thaliana
  misc_feature (1)..(1794): Ceres CDNA ID no. 12558789
  misc_feature (1)..(1794): Also Known As  Ceres SEEDLINE ME04616
  misc_feature (1)..(1794): Also Known As  Ceres CLONE ID no. 32348
ctcagcagcttcttctgctttcaattactctcgccgacgattttctcaccggaaaaaaacaatatcattgcggatacacaaactataatggacctcctcttgctggagaagtctttaatcgccgtcttcgtggcggtgattctcgccacggtgatttcaaagctccgcggcaagaaattgaagctacctccaggtcctataccaattccgatcttcggaaactggcttcaagtcggagatgatctcaaccaccgtaatctcgtcgattacgctaagaaattcggcgatctcttcctcctccgtatgggtcagcgaaacctagtcgtcgtctcctcaccggatctaacaaaggaagtgctcctcactcaaggcgttgagtttggatccagaacgagaaacgtcgtgttcgacattttcaccgggaaaggtcaagatatggtgttcactgtttacggcgagcattggaggaagatgagaagaatcatgacggttcctttcttcaccaacaaagttgttcaacagaatcgtgaaggttgggagtttgaagcagctagtgttgttgaagatgttaagaagaatccagattctgctacgaaaggaatcgtgttgaggaaacgtttgcaattgatgatgtataacaatatgttccgtatcatgttcgatagaagatttgagagtgaggatgatcctcttttccttaggcttaaggctttgaatggtgagagaagtcgattagctcagagctttgagtataactatggagatttcattcctatccttagaccattcctcagaggctatttgaagatttgtcaagatgtgaaagatcgaagaatcgctcttttcaagaagtactttgttgatgagaggaagcaaattgcgagttctaagcctacaggtagtgaaggattgaaatgtgccattgatcacatccttgaagctgagcagaagggagaaatcaacgaggacaatgttctttacatcgtcgagaacatcaatgtcgccgcgattgagacaacattgtggtctatcgagtggggaattgcagagctagtgaaccatcctgaaatccagagtaagctaaggaacgaactcgacacagttcttggaccgggtgtgcaagtcaccgagcctgatcttcacaaacttccataccttcaagctgtggttaaggagactcttcgtctgagaatggcgattcctctcctcgtgcctcacatgaacctccatgatgcgaagctcgctggctacgatatcccagcagaaagcaaaatccttgttaatgcttggtggctagcaaacaaccccaacagctggaagaagcctgaagagtttagaccagagaggttctttgaagaagaatcgcacgtggaagctaacggtaatgacttcaggtatgtgccatttggtgttggacgtcgaagctgtcccgggattatattggcattgcctattttggggatcaccattggtaggatggtccagaacttcgagcttcttcctcctccaggacagtctaaagtggatactagtgagaaaggtggacaattcagcttgcacatccttaaccactccataatcgttatgaaaccaaggaactgttaaactttctgcacaaaaaaaaggatgaagatgactttataaatgtttgtgaaatctgttgaaatattcccttgttttgcttttgtgagatgtttttgtgtaaaatgtctttaaatggttcgttctacgattgcaataataattagtggtgctcattgttttggatggatcaatgttatacttatatcattt

SEQ ID NO: 201 - protein, 505 aa, Arabidopsis thaliana
  misc_feature (1)..(505): Ceres CDNA ID no. 12558789
  misc_feature (1)..(505): Also Known As  Ceres SEEDLINE ME04616
  misc_feature (1)..(505): Also Known As  Ceres CLONE ID no. 32348
  misc_feature (34)..(499): Pfam Name: p450 Pfam Description: Cytochrome P450
  misc_feature: Phenotype: Late Flowering Useful for delaying flowering time
  misc_feature: Phenotype: Dark Green Useful for increasing chlorophyll and photosynthetic capacity
  misc_feature: Phenotype: Yellow-Green Viable 1 Useful for making lethal plants for genetic confinement systems
  misc_feature: Phenotype: ROSETTE LEAVES Useful for making ornamental plants with modified leaves
  misc_feature: Phenotype: Curled 3 Useful for making plants with altered leaf shape e.g., curled leaves
  misc_feature: Phenotype: Oval Shaped Useful for making plants with increased biomass and foliage
  misc_feature: Phenotype: Short Useful for making shorter plants
MDLLLLEKSLIAVFVAVILATVISKLRGKKLKLPPGPIPIPIFGNWLQVGDDLNHRNLVDYAKKFGDLFLLRMGQRNLVVVSSPDLTKEVLLTQGVEFGSRTRNVVFDIFTGKGQDMVFTVYGEHWRKMRRIMTVPFFTNKVVQQNREGWEFEAASVVEDVKKNPDSATKGIVLRKRLQLMMYNNMFRIMFDRRFESEDDPLFLRLKALNGERSRLAQSFEYNYGDFIPILRPFLRGYLKICQDVKDRRIALFKKYFVDERKQIASSKPTGSEGLKCAIDHILEAEQKGEINEDNVLYIVENINVAAIETTLWSIEWGIAELVNHPEIQSKLRNELDTVLGPGVQVTEPDLHKLPYLQAVVKETLRLRMAIPLLVPHMNLHDAKLAGYDIPAESKILVNAWWLANNPNSWKKPEEFRPERFFEEESHVEANGNDFRYVPFGVGRRSCPGIILALPILGITIGRMVQNFELLPPPGQSKVDTSEKGGQFSLHILNHSIIVMKPRNC

SEQ ID NO: 202 - protein, 504 aa, Malus x domestica
  misc_feature (1)..(504): Public GI no. 68164961
  misc_feature (1)..(504)
  Functional Homolog of CDNA ID no. 12558789at SEQ ID no. 201with e-value of 2.7E-241 and percent identity of 87.48
MDLLLLEKTLLGLFVAVIVAIAISKLRGKKFKLPPGPIPVPVFGNWLQVGDDLNHRNLTDMAKKFGDCFLLRMGQRNLVVVSSPELAKEVLHTQGVEFGSRTRNVVFDIFTGEGQDMVFTVYGEHWRKMRRIMTVPFFTNKVVQQYRYGWESEAAAVVEDVKKHPEAATSGMVLRRRLQLMMYNNMYRIMFDRRFESEEDPLFVKLKALNGERSRLAQSFDYNYGDFIPILRPFLRGYLKICKEVKEKRIQLFKDYFVDERKKLSSTKPTTNEGLKCAIDHILDAQQKGEINEDNVLYIVENINVAAIETTLWSIEWGIAELVNHPEIQKKLRNELDTVLGRGVQITEPDVPKLPYLQAVVKETLRLRMAIPLLVPHMNLQDAKLGGFDIPAESKILVNAWWLANNPALWKKPEEFRPERFLEEESKVEANGNDFRYLPFGVGRRSCPGIILALPILGITIGRLVQNFELLPPPGQSKLDTSEKGGQFSLHILKHSTIVMKPRA

SEQ ID NO: 203 - DNA, 1518 bp, Populus balsamifera subsp. trichocarpa
  misc_feature (1)..(1518): Ceres GDNA ANNOT ID no. 1470719
atggatctcctcctcctggagaagaccctcttgggttctttcgttgccattctcgttgccattctcgtttctaaactacgtggcaaacgttttaaactccctccaggtcctatacctgtccccgtgtttggaaactggcttcaagttggtgatgatttgaaccaccgtaacctcaccgacttagccaagaaattcggtgacatcttcctccttcgtatgggccaacgtaaccttgttgtcgtctcttctcctgacctatccaaagaggttctgcacacacaaggtgttgagttcgggtcgagaacaagaaatgttgtttttgatatctttactggaaagggacaagacatggtgttcactgtctacggtgaacattggaggaagatgaggagaatcatgactgtccctttctttacaaacaaggttgtccaacaatataggtatggctgggaggaggaagccgctcaagttgtcgaggatgttaagaaaaaccctgaggctgcaaccaatgggattgttttgaggaggagattgcaactcatgatgtataataatatgtacaggattatgtttgataggagatttgagagcgaagacgatcctttgtttaacaagctcaaggctttgaatggtgagaggagcagattggctcagagttttgattataattatggtgatttcatccccattttgagacctttcttgagaggttacttgaagatctgccaggaggttaaggagagaaggttgcaactcttcaaggactactttgtcgatgagaggaagaaacttgcaagcacaaagaacatgaacaatgaagggttgaagtgcgccatagaccatatcctcgatgctcaaaagaaaggagagatcaacgaggacaacgttctttacattgttgagaacatcaacgtcgctgcaattgagacaacactatggtcgatcgagtggggaattgctgagcttgtgaaccatcctgaaatccagaagaagttgcgccatgagctcgataccttgcttggacctggtcaccaaatcaccgagcctgacacctacaagctcccttaccttaatgctgtaatcaaagagaccctccgacttaggatggcaattcctctacttgtcccacacatgaaccttcatgatgccaagcttggaggcttcgacattccagctgagagcaagatcttggtcaatgcctggtggctcgccaacaaccctgcccactggaaaaaccctgaagaattcaggccagagaggttcttggaagaggaggccaaggttgaggccaatggcaatgatttcaggtaccttccatttggagttgggagaaggagctgtcctggaattattcttgcattgccaattcttggcattactctgggacgtctggtacagaatttcgagctcttgcctcctcccggacagtcaaagatcgacaccgcagagaaaggtggacagttcagtttgcacatattgaagcactccactattgttgcaaagccaaggtccttttaa

SEQ ID NO: 204 - protein, 433 aa, Populus balsamifera subsp. trichocarpa
  misc_feature (1)..(433): Ceres GDNA ANNOT ID no. 1470719
  misc_feature (1)..(433)
  Functional Homolog of CDNA ID no. 12558789at SEQ ID no. 201with e-value of 1.5E-206 and percent identity of 87.27
MGQRNLVVVSSPDLSKEVLHTQGVEFGSRTRNVVFDIFTGKGQDMVFTVYGEHWRKMRRIMTVPFFTNKVVQQYRYGWEEEAAQVVEDVKKNPEAATNGIVLRRRLQLMMYNNMYRIMFDRRFESEDDPLFNKLKALNGERSRLAQSFDYNYGDFIPILRPFLRGYLKICQEVKERRLQLFKDYFVDERKKLASTKNMNNEGLKCAIDHILDAQKKGEINEDNVLYIVENINVAAIETTLWSIEWGIAELVNHPEIQKKLRHELDTLLGPGHQITEPDTYKLPYLNAVIKETLRLRMAIPLLVPHMNLHDAKLGGFDIPAESKILVNAWWLANNPAHWKNPEEFRPERFLEEEAKVEANGNDFRYLPFGVGRRSCPGIILALPILGITLGRLVQNFELLPPPGQSKIDTAEKGGQFSLHILKHSTIVAKPRSF

SEQ ID NO: 205 - DNA, 1941 bp, Populus balsamifera subsp. trichocarpa
  misc_feature (1)..(1941): Ceres GDNA ANNOT ID no. 1479959
atggatctcctcctcttggagaagaccctgttgggttcttttgttgccattcttgttgccattcttgtttcacaactacgtggcaaacgttttaaactcccacctggtcctttaccggtccccgtgtttggcaactggcttcaagttggtgatgatctgaaccaccgtaacctcactgatttggccaagaagtttggtgacatcctcctcctccgtatgggccaacgtaatcttgttgtcgtctcctcacctgacctagctaaagaggttctgcacacgcaaggtgttgaattcgggtcaagaacaagaaacgttgtttttgatattttcactgggaaaggtcaagacatggttttcactgtctatggtgaacattggaggaagatgaggagaatcatgacagtccctttcttcacgaacaaggttgttcaacaatataggtatggatgggaagaggaagcggctcaagttgtcgaggatgttaagaaaaaccccgaggctgcaactcatgggattgttttgaggaggagactgcaactgatgatgtataacaacatgtataggatcatgtttgataggagatttgagagcgaagaggatcctttgtttaataagcttaaggctttgaatggtgagaggagcagattggctcagagttttgattacaattacggtgattttatccccattttgagacctttcttgagaggttacttgaagatctgcaaggaggttaaagagagaaggctgcaactcttcaaggactactttgttgaagagaggaagaaacttggaagcacaaagagcatgagcaatgaaggcttgaaatgtgcaattgatcatattttggatgctcaaaagaaaggagagatcaatgaggacaacgttctttacatcgtggagaacatcaatgttgctgcaattgagacaacactgtggtcgattgagtggggaattgctgagcttgtgaaccatcctgaaatccagaagaagttgcgtgatgagctcgataccgtgcttggaccgggtcaccaaatcactgagcctgacaccaacaagctgccttaccttaatgctgtcatcaaagagactctccggctcaggatggcgattcctctgcttgtcccacacatgaacctccatgatgctaagcttggaggttttgacatccccgccgagagcaagatcctggtaaacgcatggtggcttgccaacaaccctgctaagtggaaaaaccctgaagaattcaggccagagaggttcttcgaagaggaggccaaggttgaggccaatggcaatgatttcaggtacctcccctttggagttgggagaaggagctgccctggaattattcttgcattaccaattcttggtattactctgggacgtttggtacagaattttgagctcttgcctcctcctggacagtccaagattgacacctcagagaaaggtggacagttcagcttgcacattttgaaacactccaccattgttgcaaagccaagggaagggacagaaagaattttgtgtttgaggtttcgtaggcctggagccccagctagaccgcggttacttgggcctggggcctcgaccagaccccggttttctgggccggcgcccaagccagacccagcacagttgggtttggcgccacaacgaggcttagcgcagggggcacttgatcgaagtcactgggattttgcaaccctgtctaactcaaggctcttaggtctggtgtcaggaccccagattaagtttaccaggaatccagtatccatccctgttgtcatcctctggtggaaagaaaaggagacacctgatgtaaaaagaaatccccagatgaaacaaaggcatagacgagcagaaaagcatgaaggaaagaacaaagcaggaaaaattgtgggtataaaccaggccccaaattcaaagcctccataa

SEQ ID NO: 206 - protein, 574 aa, Populus balsamifera subsp. trichocarpa
  misc_feature (1)..(574): Ceres GDNA ANNOT ID no. 1479959
  misc_feature (1)..(574)
  Functional Homolog of CDNA ID no. 12558789at SEQ ID no. 201with e-value of 6.6E-206 and percent identity of 87.24
MGQRNLVVVSSPDLAKEVLHTQGVEFGSRTRNVVFDIFTGKGQDMVFTVYGEHWRKMRRIMTVPFFTNKVVQQYRYGWEEEAAQVVEDVKKNPEAATHGIVLRRRLQLMMYNNMYRIMFDRRFESEEDPLFNKLKALNGERSRLAQSFDYNYGDFIPILRPFLRGYLKICKEVKERRLQLFKDYFVEERKKLGSTKSMSNEGLKCAIDHILDAQKKGEINEDNVLYIVENINVAAIETTLWSIEWGIAELVNHPEIQKKLRDELDTVLGPGHQITEPDTNKLPYLNAVIKETLRLRMAIPLLVPHMNLHDAKLGGFDIPAESKILVNAWWLANNPAKWKNPEEFRPERFFEEEAKVEANGNDFRYLPFGVGRRSCPGIILALPILGITLGRLVQNFELLPPPGQSKIDTSEKGGQFSLHILKHSTIVAKPREGTERILCLRFRRPGAPARPRLLGPGASTRPRFSGPAPKPDPAQLGLAPQRGLAQGALDRSHWDFATLSNSRLLGLVSGPQIKFTRNPVSIPVVILWWKEKETPDVKRNPQMKQRHRRAEKHEGKNKAGKIVGINQAPNSKPP

SEQ ID NO: 207 - DNA, 1518 bp, Populus balsamifera subsp. trichocarpa
  misc_feature (1)..(1518): Ceres GDNA ANNOT ID no. 1543728
atggatctcctcctcttggagaagaccctgttgggttcttttgttgccattcttgttgccattcttgtttcacaactacgtggcaaacgttttaaactcccacctggtcctttaccggtccccgtgtttggcaactggcttcaagttggtgatgatctgaaccaccgtaacctcactgatttggccaagaagtttggtgacatcctcctcctccgtatgggccaacgtaatcttgttgtcgtctcctcacctgacctagctaaagaggttctgcacacgcaaggtgttgaattcgggtcaagaacaagaaacgttgtttttgatattttcactgggaaaggtcaagacatggttttcactgtctatggtgaacattggaggaagatgaggagaatcatgacagtccctttcttcacgaacaaggttgttcaacaatataggtatggatgggaagaggaagcggctcaagttgtcgaggatgttaagaaaaaccccgaggctgcaactcatgggattgttttgaggaggagactgcaactgatgatgtataacaacatgtataggatcatgtttgataggagatttgagagcgaagaggatcctttgtttaataagcttaaggctttgaatggtgagaggagcagattggctcagagttttgattacaattacggtgattttatccccattttgagacctttcttgagaggttacttgaagatctgcaaggaggttaaagagagaaggctgcaactcttcaaggactactttgttgaagagaggaagaaacttggaagcacaaagagcatgagcaatgaaggcttgaaatgtgcaattgatcatattttggatgctcaaaagaaaggagagatcaatgaggacaacgttctttacatcgtggagaacatcaatgttgctgcaattgagacaacactgtggtcgattgagtggggaattgctgagcttgtgaaccatcctgaaatccagaagaagttgcgtgatgagctcgataccgtgcttggaccgggtcaccaaatcactgagcctgacaccaacaagctgccttaccttaatgctgtcatcaaagagactctccggctcaggatggcgattcctctgcttgtcccacacatgaacctccatgatgctaagcttggaggttttgacatccccgccgagagcaagatcctggtaaacgcatggtggcttgccaacaaccctgctaagtggaaaaaccctgaagaattcaggccagagaggttcttcgaagaggaggccaaggttgaggccaatggcaatgatttcaggtacctcccctttggagttgggagaaggagctgccctggaattattcttgcattaccaattcttggtattactctgggacgtttggtacagaattttgagctcttgcctcctcctggacagtccaagattgacacctcagagaaaggtggacagttcagcttgcacattttgaaacactccaccattgttgcaaagccaaggtccttttag

SEQ ID NO: 208 - protein, 433 aa, Populus balsamifera subsp. trichocarpa
  misc_feature (1)..(433): Ceres GDNA ANNOT ID no. 1543728
  misc_feature (1)..(433)
  Functional Homolog of CDNA ID no. 12558789at SEQ ID no. 201with e-value of 5.2E-206 and percent identity of 87.04
MGQRNLVVVSSPDLAKEVLHTQGVEFGSRTRNVVFDIFTGKGQDMVFTVYGEHWRKMRRIMTVPFFTNKVVQQYRYGWEEEAAQVVEDVKKNPEAATHGIVLRRRLQLMMYNNMYRIMFDRRFESEEDPLFNKLKALNGERSRLAQSFDYNYGDFIPILRPFLRGYLKICKEVKERRLQLFKDYFVEERKKLGSTKSMSNEGLKCAIDHILDAQKKGEINEDNVLYIVENINVAAIETTLWSIEWGIAELVNHPEIQKKLRDELDTVLGPGHQITEPDTNKLPYLNAVIKETLRLRMAIPLLVPHMNLHDAKLGGFDIPAESKILVNAWWLANNPAKWKNPEEFRPERFFEEEAKVEANGNDFRYLPFGVGRRSCPGIILALPILGITLGRLVQNFELLPPPGQSKIDTSEKGGQFSLHILKHSTIVAKPRSF

SEQ ID NO: 209 - protein, 505 aa, Lithospermum erythrorhizon
  misc_feature (1)..(505): Public GI no. 16555877
  misc_feature (1)..(505)
  Functional Homolog of CDNA ID no. 12558789at SEQ ID no. 201with e-value of 0 and percent identity of 86.73
MDLLLLEKALIGLFFSFIIAIVISKLRGKKFKLPPGPIPVPIFGNWLQVGDDLNHRNLTEYAKKFGEIFLLRMGQRNLVVVSSPDLAKEVLHTQGVEFGSRTRNVVFDIFTGKGQDMVFTVYGEHWRKMRRIMTVPFFTNKVVQQYRKGWESEVESVIEDVKKIPESETVGIVLRKRLQLMMYNNMFRIMFDRRFESENDPLFMKLRALNGERSRLAQSFDYNYGDFIPILRPFLRGYLKICKEVKETRLKLFKDYFVEERKKIASTKSTTTNGLKCAIDHILEAQQKGEINEDNVLYIVENINVAAIETTLWSIEWGIAELVNHPEIQKKLRDEIDTILGPGVQVTEPDTHKLPYLQAVIKETLRLRMAIPLLVPHMNLHDAKLNGYDIPAESKILVNAWWLANNPAQWKNPEEFRPERFLEEEAKVEANGNDFRYLPFGVGRRSCPGIILALPILGITLGRLVQNFELLPPPGQSKLDTSEKGGQFSLHILKHSTIVMKPRSL

SEQ ID NO: 210 - DNA, 1488 bp, Arabidopsis thaliana
  misc_feature (1)..(1488): Ceres CDNA ID no. 36695523
  misc_feature (1)..(1488): Ceres CDNA ID no. 12601981
  misc_feature (1)..(1488): Also Known As  Ceres SEEDLINE ME04628
atggacctcacccaaatcctactcctctcctttctctttctcactatctccatcaaactcttgctcacaaaatctaaccggaaacctaatcttcctccttctccggcttaccctttaccggttatcggccacctccacctcctcaagcaaccggtccaccgaacattccactccatctctaagtcccttggaaatgctccaatcttccacctccgcctgggaaaccgcctcgtttacgtcatctcctcacactccatagccgaagaatgtttcaccaaaaacgacgtcgttcttgcgaaccgtcctgatatcatcatggccaaacacgtcggctataactttaccaatatgattgcagcatcttacggcgaccactggaggaatctccgccgcatcgccgccgtcgagatattttcttctcatagaatcagtaccttttcttctatccgtaaagacgagatccgacggctcataacacatctctctagagactccttgcacggatttgttgaagtggagttgaaatcgttattaaccaacttggcattcaacaacatcatcatgatggtagccggaaaacgatattacggtaccggtacagaagacaatgatgaagccaagctcgtgagggaacttatagcggagataatggccggcgccggttctggaaatttggctgattatcttccgtccataaattgggtcacaaactttgagaaccagaccaaaatcttggggaatcgactcgatagagtcctgcaaaaactggttgatgagaaacgtgcagagaaagaaaagggtcaaactttgatcgatcatttgctttctttccaagaaaccgaacccgagtactatactgatgtcatcatcaaaggaatcatactggctttggttcttgcggggacagatacatcttcagtgacgttggaatgggcaatgtcaaatttgctgaaccatccagagatacttgagaaagcgagagcggagatcgatgataaaatcggttcagaccggttagttgaagaatcagatattgtaaatctccattatctccaaaacattgtgtcagaaacattacgtttgtatcctgcggttccactactactccctcatttctcatcggatgaatgtaaagtggcgggctacgatatgccacgtcgcacgttgttattaacaaacgtatgggcgatgcatagagatccaggtttatgggaagagccagagaggttcaagccggagaggttcgagaaagaaggagaggctcgaaagctaatgccgtttgggatgggacgacgagcttgtcctggagctgagcttgggaagcggttagtgagccttgctcttgggtgcttgattcagtctttcgagtgggagagagttggtgcagaacttgtggacatgactgaaggcgaagggatcactatgcctaaagctactccgttgcgagctatgtgcaaggcacgtgccattgttggtaaaacgatataa

SEQ ID NO: 211 - protein, 495 aa, Arabidopsis thaliana
  misc_feature (1)..(495): Ceres CDNA ID no. 36695523
  misc_feature (1)..(495): Also Known As  Ceres SEEDLINE ME04628
  misc_feature (33)..(484): Pfam Name: p450 Pfam Description: Cytochrome P450
  misc_feature: Phenotype: Late Flowering Useful for delaying flowering time
  misc_feature: Phenotype: Dark Green Useful for increasing chlorophyll and photosynthetic capacity
  misc_feature: Phenotype: ROSETTE LEAVES Useful for making ornamental plants with modified leaves
  misc_feature: Phenotype: Short Useful for making shorter plants
MDLTQILLLSFLFLTISIKLLLTKSNRKPNLPPSPAYPLPVIGHLHLLKQPVHRTFHSISKSLGNAPIFHLRLGNRLVYVISSHSIAEECFTKNDVVLANRPDIIMAKHVGYNFTNMIAASYGDHWRNLRRIAAVEIFSSHRISTFSSIRKDEIRRLITHLSRDSLHGFVEVELKSLLTNLAFNNIIMMVAGKRYYGTGTEDNDEAKLVRELIAEIMAGAGSGNLADYLPSINWVTNFENQTKILGNRLDRVLQKLVDEKRAEKEKGQTLIDHLLSFQETEPEYYTDVIIKGIILALVLAGTDTSSVTLEWAMSNLLNHPEILEKARAEIDDKIGSDRLVEESDIVNLHYLQNIVSETLRLYPAVPLLLPHFSSDECKVAGYDMPRRTLLLTNVWAMHRDPGLWEEPERFKPERFEKEGEARKLMPFGMGRRACPGAELGKRLVSLALGCLIQSFEWERVGAELVDMTEGEGITMPKATPLRAMCKARAIVGKTI

SEQ ID NO: 212 - protein, 499 aa, Cicer arietinum
  misc_feature (1)..(499): Public GI no. 4894170
MEYNFLTYIIFLSLFLITTKLLFSKRKFKKLPPCPPSIPIIGNLHQVKQPIHHTFYNLSKKYGPIFTLKFGSQPVVVVSSASLVEECFTKNDIIFANRIHSAKTKYLGYNNTNMVSTSYGDLWRNLRRISSIEILSTHRLNSFSEIRKDETMRLIGKLAKKSHKDFTKVELRSLFGELTFNTIMRMVCGKRFYGEESDGTNAEEAKKFRDMMNEMQEFGLGSNLGDFVPLFKLFDFSGGHKKLKKVGEKMDALFQGLVDEHRNNKDKNLNTMIDHLLSLQESQPDYYSDQIIKGLIMALIVAGTETSSVTLEWAMSNLLNHPEILEKAKIELDNHIGQEHLIEEAEATKLQYLQNIISETLRLHPPVTMLLPHLSSHDCTIGGYDVPRNTMLMVNAWAIHRDPNLWADPMSFKPERFENGQGDIGGFIPFGMGRRACPGSGLALRTLGLTLGSLIQCFEWKRIGKEEVDMSEGSGTVVPKAIPLEAQCKARPIINKIFN

SEQ ID NO: 213 - protein, 479 aa, Glycine max
  misc_feature (1)..(479): Ceres CLONE ID no. 521542
MTPFYFLLFAFILFLSINFLIQTRRFKNLPPGPFSFPIIGNLHQLKQPLHRTFHALSQKYGPIFSLWFGSRFVVVVSSPLAVQECFTKNDIVLANRPHFLTGKYIGYNNTTVAVSPYGDHWRNLRRIMALEVLSTHRINSFLENRRDEIMRLVQKLARDSRNGFTKVELKSRFSEMTFNTIMRMVSGKRYYGEDCDVSDVQEARQFREIIKELVTLGGANNPGDFLALLRWFDFDGLEKRLKRISKRTDAFLQGLIDQHRNGKHRANTMIDHLLAQQQSQPEYYTDQIIKGLALVMLLAGTDTSAVTLEWAMSNLLNHPEILKKAKNELDTHIGQDRLVDEPDIPKLPYLQSIVYETLRLHPAAPMLVPHLSSEDCTIGEYNIPQNTILLVNAWAIHRDPKLWSDPTHFKPERFENESEANKLLPFGLGRRACPGANLAQRTLSLTLALLIQCFEWKRTTKKEIDMTEGKGLTVSKNIP

SEQ ID NO: 214 - protein, 499 aa, Medicago truncatula
  misc_feature (1)..(499): Public GI no. 33521521
MTTFYLSLIISLFFLIITLKVFFNTSRKFKNLPPGPQCLPIIGNLHQLKQPLHHTFHTLSQKYGQIFSLWFGSRLVVVVSSLTIAQECFTKNDIVLANRPHFLTGKYIGYNNTTVAQSPYGDHWRNLRRILSIEILSSHRLNSFLEIRRDEIMRLIQKLAQKSYNGFTEVELRPMFSEMTFNTIMRMVSGKRYYGNDCDVSDVEEARLFRGIIKEVVSLGGANNVGDFLGFLRWFDFDGLEKRLKKISKRTDAFLQGLIDEHRFGKRNSNTMIDHLLTQQQSQPEYYTDQIIKGLMVVMLLAGTDTSSVTIEWAMSNLLNHPEIMKKAKNELDTHIGHDRQVDEHDISKLPYLQSIVYETLRLHAAAPLLVPHLSSEDFSLGGYNIPQNTILMVNAWVIHRDPNLWSDPTCFKPERFEKEGEVNKLLSFGLGRRACPGENLSQRTEGLTLGLLIQCFEWKRIGEEKIDMVEAKGITAGKKTSLNAMCKVRHPLKINDVF

SEQ ID NO: 215 - protein, 506 aa, Sesamum radiatum
  misc_feature (1)..(506): Public GI no. 81157970
MEAEMLYSALALTFAIFMVYRILSNSQEKSSLIKLPPSPPGWLPVIGHVHLMKNLLHRTLYDFSQKLGPIFSLRFGTRLVVVVSSSSLVEECFTKYDIVLANRPQPSVDRRSLGFSTTSVIGAPYGDHWRNLRKLCDLEVFAPTRLASFLSIRLDERDRMISSLYKISSAGFAKVNLETKIVELTFNNIMRMVAGKRYYGEEAEDDEEAKRFRDLTKEALELTSASNPGEIFPILRWLGFNGLEKKLAVHARKTDEFMQGLLDEHRRGERQNTMVDHLLSLQESQPEYYTDEIITGLIVALIIAGTDASVVTTEWAMSLILNHPQVLEKARKELDTLVGHERMVDEHDLPKLRYLHCIVLETLRLFPSVPTLVPHEPSEDCKIGGYNVPKGTMILVNAWAIHRDPKVWDDPLSFKPDRFETMEVETHKLLPFGMGRRACPGAGLAQKFVGLALGSLIQCFEWERMSAEKIDLNEGSGITLPKAKTLEAMCKPRHIMERVLRQVSNV

SEQ ID NO: 216 - protein, 506 aa, Sesamum indicum
  misc_feature (1)..(506): Public GI no. 81157968
MEAEMLYSALALTFAIFMVYRILSNSQDKRSLTKLPPSPPGWLPVIGHAHLMKNLLHRTLYDFSQKLGPIFSIRFGSRLVVVVSSSSLVEECFTKYDIVLANRPQASVDRRSLGFSTTSVIGAPYGDHWRNLRKLCDLEVFAPTRLASFLSIRLDERDRMISALYKISSAGFAKVNLEAKIVELTFNNIMRMVAAKRYYGEEAEDDEEAKRFRDLTKEALELTSASNPGEIFPILRWLGCNGLEKKLAVHSRKTDEFMQGLLDEHRRGERQNTMVDHLLSLQESQPEYYTDEIITGLIVALIIAGTDASVVTTEWAMSLLLNHPKVLEKARKELDTLVGHERMVDEHDLPKLRYLHCIVLETLRLFPSVPTLVPHEPSEDCKIGGYNVPKGTMVLVNAWAIHRDPKVWDDPLSFKPDRFEIMEVETHKLLPFGMGRRACPGAGLAQKFVGLALGSLIQCFDWERTSPEKIDLNEGSGITLPKAKTLEAMCKPRHVMEKVLRQVSNV

SEQ ID NO: 217 - protein, 520 aa, Helianthus tuberosus
  misc_feature (1)..(520): Public GI no. 3059131
MEIPYLLTVVLLLLTTLYLLLFTTLLLLFTTLYLLLRRRRSSTLPPTIFPYLPIIGHLYLLKPPLYRTLAKLSAKHGPILRLQLGFRRVLIVSSPSAAEECFTKNDIVFANRPKMLFGKIIGVNYTSLAWSPYGDNWRNLRRIASIEILSIHRLNEFHDIRVEETRLLIQKLLSACNSGSSQVTMKFSFYELTLNVMMRMISGKRYFGGDNPELEEEGKRFRDMLDETFVLAGASNVGDYLPVLSWLGVKGLEKKLIKLQEKRDVFFQGLIDQLRKSKGTEDVNKKKTMIELLLSLQETEPEYYTDAMIRSFVLVLLAAGSDTSAGTMEWVMSLLLNHPQVLKKAQNEIDSVIGKNCLVDESDIPNLPYLRCIINETLRLYPAGPLLVPHEASSDCVVGGYNVPRGTILIVNQWAIHHDPKVWDEPETFKPERFEGLEGTRDGFKLLPFGSGRRSCPGEGLAVRMLGMTLGSIIQCFDWERTSEELVDMTEGPGLTMPKAIPLVAKCKPRVEMTNLLSEL

SEQ ID NO: 218 - protein, 499 aa, Lotus japonicus
  misc_feature (1)..(499): Public GI no. 7415996
MDIISFLYYSLFYVALFAIIKLFLGSRKFKNLPPGPTSLPIIGNLHHLKRPLHRTFRALSEKYGDVFSLWFGNRLVVVVSSFADVQECFTKNDVVLANRPRFLSGKYIFYNYTTLGSTSYGEHWRNLRRITSLDVLSNHRINSFSPIRRDETTRLIRKLAEDSAKNFSEVELTSRFFDMTFNNIMRMISGKRYYGEDCDMTELQEASEFRDMVTELLQLSGANNKADFMPILRLVDFEGLEKRVKGISSKTDRFLRGLLQEHRDKKQRTANTMIDHLLTLQESQPEYYTDQIIKGLALAMLLAGTDSSAVTLEWSMCNVLNYPEVLEKIKAELDTHVGQDRLVDESDIPKLTYLKNVINETLRLYTPAPLLLPHSASDDCTIGGYKVPRDTIVLINAWALHRDPQLWTEATTFKPERFDKKGELEKLIPFGLGRRACPGELLAIRAISMTLALLIQCFDWKRVSDEEIDMGERDGFVLMKSIPVKAMCKSRPVINNVFK

SEQ ID NO: 219 - protein, 499 aa, Glycyrrhiza echinata
  misc_feature (1)..(499): Public GI no. 2443348
MEILSLLSYSVFYLALFFIFNIVIRARKFKNLPPGPPSLPIIGNLHHLKRPLHRTFKGLSEKYGHVFSLWFGSRLVVVVSSASEFQQCFTKNDVVLANRPRFLSGKYIFYNYTTLGSTSYGEHWRNLRRITALDVLSNHRINSFSGIRRDETQRLITRLADDSSTNFAEMELSSRLYDMTFNNIMRMISGKRYYGEDCDTSDLQEASQFRDMVSELLQLSGANNKTDFMPLLRFLDFENLEKRLKDISGKTDAFLRGLIEEHRTKKERANTMIDHLLNLQDSQPEYYTDQIIKGLALAMLLAGTDSSAVTLEWSMSNLLNHPEVLKKVKDELDTHVGQDRLVDESDLPKLTYLKNVINETLRLYTPAPLLLPHSTSDECNIGGYKVPQDTIVLINAWAIHRDPELWTEATTFKPERFEKKGELEKLIAFGMGRRACPGEGLAIRAISMTLALLIQCFDWKLINGDKIDLAERDGFTLTKLVPLKAMCKSRPVINKVFKQ

SEQ ID NO: 220 - protein, 505 aa, Helianthus tuberosus
  misc_feature (1)..(505): Public GI no. 3059129
MEIPYLLTTTLLLLFTTLYLLLRRRSSTLPPTIFPSLPIIGHLYLLKPPLYRTLAKLSAKHGQILRLQLGFRRVLIVSSPSAAEECFTKNDIVFANRPKMLFGKIIGVNYTSLAWSPYGDNWRNLRRIASIEILSIHRLNEFHDIRVEETRLLIQKLLSACNSGSSQVTMKFSFYELTLNVMMRMISGKRYFGGDNPELEEEGKRFRDMLDETFVLAGASNVGDYLPVLSWLGVKGLEKKLIKLQEKRDVFFQGLIDQLRKSKGTEDVNKKKTMIELLLSLQETEPEYYTDAMIRSFVLVLLAAGSDTSAGTMEWVMSLLLNHPQVLKKAQNEIDSVIGKNCLVDESDIPNLPYLRCIINETLRLYPAGPLLVPHEASSDCVVGGYNVPRGTILIVNQWAIHHDPKVWDEPETFKPERFEGLEGTRDGFKLLPFGSGRRSCPGEGLAVRMLGMTLGSIIQCFDWERTSEELVDMTEGPGLTMPKAIPLVAKCKPRVEMTNLLSEL

SEQ ID NO: 221 - protein, 499 aa, Glycyrrhiza echinata
  misc_feature (1)..(499): Public GI no. 4200044
MDILSLLSYSVFYLALFFIFNIVIRARKFKNLPPGPPSLPIIGNLHHLKRPLHRTFKGLSEKYGHVISLWFGSRLVVVVSSASEFQQCFTKNDVVLANRPRFLSGKYIFYNYTTLGSTSYGEHWRNLRRITALDVLSNHRINSFSGIRRDETQRLITRLADDSSTNFAEIELSYRFYDMTFNNIMRMISGKRYYGEDCDMSDLQEASQFRDMVSELLQLSGANNKTDFMPLLRFLDFENLEKRLKDISGKTDAFLRGLIQEHRAKKERANTMIDHLLNLQDSQPEYYTDQIIKGLALAMLLAGTDSSAVTLEWSMSNLLNHPEVLKKVKDELDTHVGQDRLVDESDLPKLSYLKNVINETLRLYTPAPLLLPHSTSDECNIGGYKVPQDTIVLINAWAIHRDPELWTEATTFKPERFEKKGELEKLIAFGMGRRACPGEGLAIRAISMTLALLIQCFDWKLTNGDKIDMAERDGFTLTKLVPLKAMCKSRPVINKVFKQ

SEQ ID NO: 222 - protein, 507 aa, Sesamum alatum
  misc_feature (1)..(507): Public GI no. 81157972
MEAEMLYSALALTFAIIMVHRILSNSQNKRSLINLPPSPPGWLPIIGHLHLIKNPLHRTLYDCSQKLGSIFSVWFGSRLVVVVSSSSLVEECFTKYDIVLANRPDLHLDLRSLGASTISVIGAPYGDHWRNLRKLCDLEVFAPTRLASFLSIRRDERDRMISGLYKISSAGLAKVNLEAKIAELTFNNLMRMLAGKIYYGEEAEDEEEAKRFRDMTKEALELMNTFNLAEIFPILRWIGCNGFEKQLPVHSRKTDEIMQGLLDEHRRGERQNTMVGHLLSLQESQPDYYTDEIITGLIISLIIAGTDASVVTTEWAMSLLLNHPKVLEKARQEMDTLVGHERMVEEDDLPKLRYLHYIILETLRLFPSVPTLVPHEPSEDCNIGGYNVPKGTMIIVNAWAIHRDPKVWDDPMSFKPDRFETLEVETHKLLPFGMGRRGCPGAGLAKKFVGLALASLIQCFDWERISAEKIDLKEGASRITLPKATTLEAMCKPRHVMEKVLRQVSNV

SEQ ID NO: 223 - protein, 502 aa, Pisum sativum
  misc_feature (1)..(502): Public GI no. 37726104
MSPLFYYSFLSLTFIITIKILLQTQSRRLKNLPPGPPTIPIIGNLHHLKHPLHRTFATLSQKYGDIVSLWFGSRLVVVISSASLVEECFIKNDVVLANRPRFLTGKYIFYDYTTLGSVSYGDHWRNLRRITTIDVLSNNRLTSFLGVRTDEANRLIQNIIKHGASRDFIKVELRSILTEMTFNGMMRMISGKRYYGDDGDVTEVEEAKQFREIISEILSLLGANNKGDFLPLLRWFDLDDLEKRCKKIANRADAFLEGLIQEHRSANHGNGDTMIDHLLKLSEVQLNIIPSHIIKGLIQAMLLAGTDTSALAIEWVMSELLNHPEVLNKAKEEIETQVGKNKIIDEQDLPKLPYLQNIISEALKLHPPAPLLLPHYSSEDCTIGGFNVPKDTIILTNVWAIHRDPTRWSDALSFKPERFEKEGEVNKLMAFGIGRRACPGLSLAQRTVGLNCGACWFQCFEWKRESEEKLDMMEGKVLPCLKRSPFKALCKGTTLLPNDLMK

SEQ ID NO: 224 - DNA, 2038 bp, Arabidopsis thaliana
  misc_feature (1)..(2038): Ceres CDNA ID no. 12575176
  misc_feature (1)..(2038): Also Known As  Ceres SEEDLINE ME04632
  misc_feature (1)..(2038): Also Known As  Ceres CLONE ID no. 1207749
aaatggaccaaatttgtggctactactctcctcaattataaaaatgaaatatttatatatcttccctgaaccaggaagatattttgtttgtcttctacaaatattatatatatgtaatttctttggataattttctaccgcttaagaagcacagatggacataatctcagggcaagctctgttactcctcttttgctttatcttatcatgttttcttatcttcaccaccacaagatctggacgaatctcccgcggggccaccgcgctgcctccaggacctccacggttaccgatcatcggaaatattcacctcgtcggaaaacatccacatcgctcattcgccgagctctcaaaaacttatggaccagtcatgagtcttaagcttggaagtttaaatacagtggttatagcttcaccagaagctgcgagagaggttttacgaacacatgaccagattttgtctgcccgtagtcccactaacgcggtacggtccatcaatcaccaagacgcttcccttgtctggcttccttcgtcgtccgctcgttggaggctgttgagaaggctgtcggtgactcagctcttgtcaccacagcgtatcgaagccacgaaagccttgaggatgaacaaggtgaaggaacttgtgagcttcataagtgaaagcagcgatagggaagaatctgttgatatttctcgtgtagccttcatcacaactcttaatatcatatcgaacattctgttttccgtcgatctcggtagctacaacgcgaaagcttctattaatggggttcaagacacggtgattagtgttatggatgctgccgggactccagacgctgctaattactttccatttctgaggtttcttgatctgcaaggtaatgtgaagacttttaaggtttgcacggagaggctggtaagggttttccgtgggttcattgatgctaagattgcggaaaaatcatcgcagaataaccctaaagatgtttcaaaaaacgatttcgttgacaaccttctcgattacaaaggagatgaatcagaactctccattagcgatattgaacaccttctcttggatatgtttacagcaggcacggatacaagctctagtaccctggagtgggcaatgacagagttacttaaaaaccctaaaacgatggcgaaagctcaggccgagatcgattgtgtgataggtcaaaacggtatcgttgaagagtcagatatctccaaactgccgtatttacaagcagtcgtgaaggaaactttccggttacatacgcctgttccgcttcttatcccgcgaaaagccgaatccgatgcggagattcttggtttcatggtgcttaaagatactcaggttctagtgaacgtctgggccataggacgagacccgagcgtgtgggataatccgtcccagtttgagccagagaggtttttggggaaagatatggacgtgagaggtagagattatgagcttacaccattcggagccggacgtagaatttgcccgggaatgcctttggctatgaaaacagtgtctcttatgcttgcttctcttctttattcctttgactggaagcttccgaagggtgtcctttcggaggatttggacatggacgagacctttggtctaactttgcataagaccaacccgttacatgccgtacccgtcaagaaacgcgccaatattaattagtcgtggttttataattaaaaataaacagagaaataatctccaaagctttgtttattaccaaaaactatctgttttcggttctagagtttgtttgtttctctctcttgaggtggctagagcttgaagaagtcaaaagtatccatattgatgcctagcttcggtcctcggtttaggctaggaaggaaacgaagaagtttctgcaaaccgatgcagatcatcaatggaataatgaaatgttaattttatcatttactcatataggtttccgcctcattatcatttacttgatgtttctcctaaatcttgtcatttaattgactaaggaaataacgaagaaatctcgtg

SEQ ID NO: 225 - protein, 512 aa, Arabidopsis thaliana
  misc_feature (1)..( 512): Ceres CDNA ID no. 12575176
  misc_feature (1)..( 512): Also Known As  Ceres SEEDLINE ME04632
  misc_feature (1)..( 512): Also Known As  Ceres CLONE ID no. 1207749
  misc_feature (39)..(503): Pfam Name: p450 Pfam Description: Cytochrome P450
  misc_feature: Phenotype: Late Flowering Useful for delaying flowering time
  misc_feature: Phenotype: ROSETTE LEAVES Useful for making ornamental plants with modified leaves
  misc_feature: Phenotype: Long Petioles Useful for making plants that grow better in shade
  misc_feature: Phenotype: Disorganized Rosette Useful for making plants with increased biomass
  misc_feature: Phenotype: Short Useful for making shorter plants
MDIISGQALLLLFCFILSCFLIFTTTRSGRISRGATALPPGPPRLPIIGNIHLVGKHPHRSFAELSKTYGPVMSLKLGSLNTVVIASPEAAREVLRTHDQILSARSPTNAVRSINHQDASLVWLPSSSARWRLLRRLSVTQLLSPQRIEATKALRMNKVKELVSFISESSDREESVDISRVAFITTLNIISNILFSVDLGSYNAKASINGVQDTVISVMDAAGTPDAANYFPFLRFLDLQGNVKTFKVCTERLVRVFRGFIDAKIAEKSSQNNPKDVSKNDFVDNLLDYKGDESELSISDIEHLLLDMFTAGTDTSSSTLEWAMTELLKNPKTMAKAQAEIDCVIGQNGIVEESDISKLPYLQAVVKETFRLHTPVPLLIPRKAESDAEILGFMVLKDTQVLVNVWAIGRDPSVWDNPSQFEPERFLGKDMDVRGRDYELTPFGAGRRICPGMPLAMKTVSLMLASLLYSFDWKLPKGVLSEDLDMDETFGLTLHKTNPLHAVPVKKRANIN

SEQ ID NO: 226 - DNA, 1491 bp, Populus balsamifera subsp. trichocarpa
  misc_feature (1)..(1491): Ceres GDNA ANNOT ID no. 1444156
atggagtaccttttttttgtgctactaatttcttttacttgggcatgtctacacgtgcccatcgcatccattctacttcgccggaagtccggttgcaccgtcctcccacctggccctcgccaattgccgataattggaaacatattagccctcggtgacaagccccaccgaacacttgctaacctctcacaaacttatggacctttaatgaccctcaagcttggtaggataaccacaatagtcatctcctctccgaacattgccaaagaagcattacagaaacatgaccaagccttgtccagcagaacagtcccagatgctcttcgtgtacaccacaaaaattcaatgatatggttgcctgcgtcgactcattggaaatttctcagaaaactcactgccacacaaatgttcacttcgcaaaggcttgatgccagccgagccctccgtggaaaaaaggttcaagaattgctagaatatgttcatgaaaactgtaacaatggacatgctgtcgacgttggtagatctgttttcacaactgtccttaatttaatttcaaacaccttcttctctcttgatgtaaccaattacaattctgatttgtctcaagaattcagcgatctcgtggtgggtgtcatggaacaaattggcaagccaaatattgccgactatttcccaatacttcgattagtagatccacaaggtataagacgaaagacgaataattatttgaaaagattaactcaaatttttgatagtatcatcaacgagaggacacgactacgttcttcttcggttgcatccaaggcaagccatgatgtacttgatgccctgctgattctagccaaagaaaacaatactgaattgagctccactgacatacaggttttgcttattgattttttcattgcgggcactgacactacctcaagcacagtagagtgggcaatgacagagttattactgaaccctgataaaatggtcaaagccaaaaatgagctccaacaagtcgaaggaccagttcaagaatcagacatctccaagtgtccttaccttcaagcaatagtcaaagagacatttcggctgcacccaccagttccactcctgctgccccgtaaagccgtatccgaagtagagatgcaaggcttcacagtgccaaaaaatgctcaaatactaatcaatatttgggcaataggaagagatccagccatatggccagatcctaattcgttcaagcctgaaaggttcctagaatgccaagctgacgtgaaaggaagagattttgagctaattccatttggagcaggaagaaggatttgccctggattgcctttgggccacaagatggtgcatttgacgttggcatctctcatccactcttttgattggaagattgctgatgacttgacaccagaggatatagacacgagtgaaacgtttgggattacattacataagagtgagcctctccgggctatacccatgaaaacgtga

SEQ ID NO: 227 - protein, 427 aa, Populus balsamifera subsp. trichocarpa
  misc_feature (1)..(427): Ceres GDNA ANNOT ID no. 1444156
  misc_feature (1)..(427)
  Functional Homolog of CDNA ID no. 12575176at SEQ ID no. 225with e-value of 1.5E-112 and percent identity of 52.00
MTLKLGRITTIVISSPNIAKEALQKHDQALSSRTVPDALRVHHKNSMIWLPASTHWKFLRKLTATQMFTSQRLDASRALRGKKVQELLEYVHENCNNGHAVDVGRSVFTTVLNLISNTFFSLDVTNYNSDLSQEFSDLVVGVMEQIGKPNIADYFPILRLVDPQGIRRKTNNYLKRLTQIFDSIINERTRLRSSSVASKASHDVLDALLILAKENNTELSSTDIQVLLIDFFIAGTDTTSSTVEWAMTELLLNPDKMVKAKNELQQVEGPVQESDISKCPYLQAIVKETFRLHPPVPLLLPRKAVSEVEMQGFTVPKNAQILINIWAIGRDPAIWPDPNSFKPERFLECQADVKGRDFELIPFGAGRRICPGLPLGHKMVHLTLASLIHSFDWKIADDLTPEDIDTSETFGITLHKSEPLRAIPMKT

SEQ ID NO: 228 - DNA, 1491 bp, Populus balsamifera subsp. trichocarpa
  misc_feature (1)..(1491): Ceres GDNA ANNOT ID no. 1444154
atggagtaccttttttacctgctactaatttctttttgttgggcatgtctgcacgtgctcaacgcatccgttctacttcgccggaagtccggatgcaccatcctcccacctggccctcgccaattgccgataatcggaaacatattagccctcggtgacaagccccaccgaacacttgctaaactctcacaaacttatggacctttaatgaccctcaagcttggtaggataaccacaatagtcatctcctctccgaacattgccaaagaagcactacagaaacatgaccaagccttgtctagcagaacagtcccagatgctgttcgtggacaccacaaaaactcaatcttatggttgcctgcgtcgagtcattggaaatttctcaaaaaactcactgccacacaaatgttcacttcgcaaaggcttgatgccagccgagccctccgtggaaagaaggttcaagaattgctagaatatgttcatgaaaagtgcaacaacggacatgctgtcgacgttggtagatctgttttcacaactgtccttaatttaatttcaaacaccttcttctctcttgatatagccaattacaattctgatttgtctcaagagttcagctatcttgtggtgggtgtcatggaacaaattggcaaggcaaatattgccgactatttcccaatacttcgattagtagatccacaaggtataagacgaaagacgaataattatttgaaaagattaactcaaatttttgatagtatcatcaacgagaggacacgactacgttcttcttcggttgcatccaaggcaagccatgatgtacttgatgccctgctgattctagccaaagaaaacaatactgaattgagctccactgacatacaggttttgcttctggattttttcattgcgggcactgacactacctcaagcacagtagagtgggcaatgacagagttattactgaaccctgataaaatggtcaaagccaaaaatgagctccaacaagtcgaaggaccagttcaagaatcagacatctccaagtgtccttaccttcaagcaatagtcaaagagacatttcggctgcacccaccagcaccactcctgctgccccgtaaagccgtatccgaagtagagatgcaaggcttcacagtgcccaaaaatgcacaaatactaatcaatatttgggcaataggaagagatccaaccatatggccagatcctaattcgttcaagcctgaaaggttcttagaatgccaagctgacgtgaaaggaagagattttgagctaattccatttggagcaggaagaaggatttgccctggattgcctttgggccacaagatggtgcatttggcgttggcatctctcatccactcttttgattggaagattgctgatgacttgacaccagaggatatagacacgagtgaaacgtttgggattacattacataagagtgagcctctccgggctatacccatgaaaacgtga

SEQ ID NO: 229 - protein, 427 aa, Populus balsamifera subsp. trichocarpa
  misc_feature (1)..(427): Ceres GDNA ANNOT ID no. 1444154
  misc_feature (1)..(427)
  Functional Homolog of CDNA ID no. 12575176at SEQ ID no. 225with e-value of 1.2E-110 and percent identity of 51.76
MTLKLGRITTIVISSPNIAKEALQKHDQALSSRTVPDAVRGHHKNSILWLPASSHWKFLKKLTATQMFTSQRLDASRALRGKKVQELLEYVHEKCNNGHAVDVGRSVFTTVLNLISNTFFSLDIANYNSDLSQEFSYLVVGVMEQIGKANIADYFPILRLVDPQGIRRKTNNYLKRLTQIFDSIINERTRLRSSSVASKASHDVLDALLILAKENNTELSSTDIQVLLLDFFIAGTDTTSSTVEWAMTELLLNPDKMVKAKNELQQVEGPVQESDISKCPYLQAIVKETFRLHPPAPLLLPRKAVSEVEMQGFTVPKNAQILINIWAIGRDPTIWPDPNSFKPERFLECQADVKGRDFELIPFGAGRRICPGLPLGHKMVHLALASLIHSFDWKIADDLTPEDIDTSETFGITLHKSEPLRAIPMKT

SEQ ID NO: 230 - DNA, 1503 bp, Populus balsamifera subsp. trichocarpa
  misc_feature (1)..(1503): Ceres GDNA ANNOT ID no. 1497097
atggagtaccttttttacctgctactaatttctttttgttgggcatgtctacacgtgctcaacgcatccgttctacttcgccggaagtccggttgcaccgtcctcccacctggccctcgccagttgccgataattggaaacatattagccctcggtgacaagccccaccgaacacttgctaaactctcacaaacttatggacctttaatgaccctcaagcttggtaggataaccacaatagtcatctcctctccgaatatcgccaaagaagcattacagaaacatgaccaagccttgtctagcagaacagtcccagatgctcttcatgtacaatactataactaccacaaaaattcaatggtatggttgcctgcgtcgactcattggaaatttctcagaaaactcactgccacacaaatgttcacttcgcaaaggcttgatgccagccgagccctccgtggaaaaaaggttcaagaattgctagaatatgttcatgaaaagtgcaacaacggacatgctgtcgacgttggtagatctgttttcacaactgtccttaatttaatttcaaacaccttcttctctcttgatgtaaccaattacaattctgatttgtctcaagagttcagcaatcttgtggtgggtgtcttggaacaaattggcaagccaaatattgccgactatttcccaatacttcgattagtagatccacaaggtataagacgaaagacgaataattatttgaaaagattaactcaaatttttgatagtatcatcaacgagaggacacgactacgttcttcttcggttgcatccaaggcaagccatgatgtacttgatgccctgctgattctagccaaagaaaacaatactgaattgagctccactgacatacaggttttgcttattgattttttcattgcgggcactgacactacctcaagcacagtagagtgggcaatgacagagttattactgaaccctgataaaatggtcaaagccaaaaatgagctccaacaagtcgaaggaccagttcaagaatcagacatctccaagtgtccttaccttcaagcaatagtcaaagagacatttcggctgcacccaccatcaccactcctgctgccccgtaaagccgtatccgaagtagagatgcaaggcttcacagtgcccaaaaatgcacaaatactaatcaatatttgggcaataggaagagatccagccatatggccagatcctaattcgttcaagcctgaaaggttcctagaatgccaagctgacgtgaaaggaagagattttgagctaattccatttggagcaggaagaaggatttgccctggattgcctttgggccacaagatggtgcatttgacgttggcatctctcatccactcttttgattggaagattgcaggtgacttgacaccagaggatatagacacgagtgaaacgtttgggcttacattacataagagtgagcctctccgggctatacccatgaaaacgtga

SEQ ID NO: 231 - protein, 431 aa, Populus balsamifera subsp. trichocarpa
  misc_feature (1)..(431): Ceres GDNA ANNOT ID no. 1497097
  misc_feature (1)..(431)
  Functional Homolog of CDNA ID no. 12575176at SEQ ID no. 225with e-value of 1.6E-110 and percent identity of 51.52
MTLKLGRITTIVISSPNIAKEALQKHDQALSSRTVPDALHVQYYNYHKNSMVWLPASTHWKFLRKLTATQMFTSQRLDASRALRGKKVQELLEYVHEKCNNGHAVDVGRSVFTTVLNLISNTFFSLDVTNYNSDLSQEFSNLVVGVLEQIGKPNIADYFPILRLVDPQGIRRKTNNYLKRLTQIFDSIINERTRLRSSSVASKASHDVLDALLILAKENNTELSSTDIQVLLIDFFIAGTDTTSSTVEWAMTELLLNPDKMVKAKNELQQVEGPVQESDISKCPYLQAIVKETFRLHPPSPLLLPRKAVSEVEMQGFTVPKNAQILINIWAIGRDPAIWPDPNSFKPERFLECQADVKGRDFELIPFGAGRRICPGLPLGHKMVHLTLASLIHSFDWKIAGDLTPEDIDTSETFGLTLHKSEPLRAIPMKT

SEQ ID NO: 232 - DNA, 1527 bp, Arabidopsis thaliana
  misc_feature (1)..(1527): Ceres CDNA ID no. 23498145
  misc_feature (1)..(1527): Also Known As  Ceres SEEDLINE ME04640
atggagatagtaattgcatcattggctttagttgttgtattgtggtgtatatggagaattttggagtgggtttggcttaaacctaagatgcttgagagttacctgagaagacaaggtcttgtcggaactcgttacacgcctcttgtaggagatgtgagaaggagttttagcatgttgaaggaagcaagatccaaaccgatgaaaccaacggatgatctcatctcacttgtcatgccttactcttttcacatgctcaacacttacgggaagacatttttcacatggtcaggacccatacctgccataacaataatgaatccacagctgatcaaagaagtgtacaacaagttttatgatttcgagaagacgcacacgtttcctttgacttcattgctaactgatggacttgctaatgccgatggagataaatgggtgaaacaccggaagattatcaacccggcattccattttgagaagattaagaatatggtccctacgttttataaaagttgcatcgaggtcatgtgtgaatgggagaagttagtttcagataaagggtcgtcgtgcgagcttgatgtttggccatggattgtgaatatgaccggagatgtgatctctcgaaccgcttttggtagcagttacaaagaaggacagaggatattcatattacaagcagaattagcccacctcatcatactagctcttggaaagaattacattcctgcataccggcatttcccaactaagaataacagaaggatgaaaacaatagtcaaagaaatccaagtcatactaagagggatcattagccatagagaaaaggcgagagacgctggagaagcaccgagtgacgatttgttaggtatacttcttaaatcgaattcagagcaaagtaaaggaaatggactgaacatggaagaaatcatggaagagtgcaagttgttttattttgcgggacaagagaccacttcagtacttttggcttggactatggttttgttaagccaacaccaagactggcaagctcgtgcacgagaggaagtgatgcaagtttttggccataacaaacctgatctacaaggcattaaccaactcaaagttatgacaatgattatatatgaagtcctgaggctatatcctccagtaatccagatgaacagagcgactcacaaagagataaagctaggtgatatgacactaccaggcggtattcaagtccatatgcctgttctgctaatccaccgtgacactaagctttggggcgatgatgcagcggagttcaagcccgagaggttcaaagacgggatcgcaaaggcaacaaagaaccaggtctgcttcttgcctttcgggtggggaccgaggatttgcatcggtcagaacttcgctctgttggaagcaaagatggctctggctttgattcttcagagattctccttcgagctttcaccttcctatgttcattcaccttacagagtcttcactatacatccacagtgtggggctcatcttatcctgcacaagctttga

SEQ ID NO: 233 - protein, 442 aa, Arabidopsis thaliana
  misc_feature (1)..(442): Ceres CDNA ID no. 23498145
  misc_feature (1)..(442): Also Known As  Ceres SEEDLINE ME04640
  misc_feature (3)..(438): Pfam Name: p450 Pfam Description: Cytochrome P450
  misc_feature: Phenotype: Late Flowering Useful for delaying flowering time
  misc_feature: Phenotype: Dark Green Useful for increasing chlorophyll and photosynthetic capacity
  misc_feature: Phenotype: SILIQUES Useful for increasing seed/fruit yield or modifying fruit content
  misc_feature: Phenotype: INFLORESCENCE Useful for making ornamental plants with modified flowers
  misc_feature: Phenotype: ROSETTE LEAVES Useful for making ornamental plants with modified leaves
  misc_feature: Phenotype: Serrate Margins Useful for making plants with increased biomass and foliage
  misc_feature: Phenotype: Short Useful for making shorter plants
  misc_feature: Phenotype: Short Petioles Useful for making smaller plants
  misc_feature: Phenotype: Reduced fertility Useful for sterility, genetic confinement systems
MKPTDDLISLVMPYSFHMLNTYGKTFFTWSGPIPAITIMNPQLIKEVYNKFYDFEKTHTFPLTSLLTDGLANADGDKWVKHRKIINPAFHFEKIKNMVPTFYKSCIEVMCEWEKLVSDKGSSCELDVWPWIVNMTGDVISRTAFGSSYKEGQRIFILQAELAHLIILALGKNYIPAYRHFPTKNNRRMKTIVKEIQVILRGIISHREKARDAGEAPSDDLLGILLKSNSEQSKGNGLNMEEIMEECKLFYFAGQETTSVLLAWTMVLLSQHQDWQARAREEVMQVFGHNKPDLQGINQLKVMTMIIYEVLRLYPPVIQMNRATHKEIKLGDMTLPGGIQVHMPVLLIHRDTKLWGDDAAEFKPERFKDGIAKATKNQVCFLPFGWGPRICIGQNFALLEAKMALALILQRFSFELSPSYVHSPYRVFTIHPQCGAHLILHKL

SEQ ID NO: 234 - DNA, 1280 bp, Populus balsamifera subsp. trichocarpa
  misc_feature (1)..(1280): Ceres GDNA ANNOT ID no. 1482371
gtaagaattcatttatgtggattgggccgaaaccaagagtgaacatcatgaaccctgatcagataagggacgtattcatgaagataaatgaatataagaagccctcgcacccgctgttgaaacttatagtatgtggacttgcaagtcacgagggtgaaaaatgggctaaacatagaaagataatcaacccagcattccatcaagagaagctaaagcttatgatacctgcgttttacgaaagttgtagtgggatgattaacaagtgggagaagctggtctctgtagacgaggggccatgtgaattggatgtctggcctgatcttcaaggcttaacttgtgatgctatttctcgaacgtcgtttggaagtaattacgaagaaggaaaaagaatatttgatctcctcaaggaacttaccaatcttacagctcatgttataataaaagctattgtcataccagggtacaggtttctgccgatcccatctaatagaaggctaaaagctattgacaaagaaataaaagcttctcttaatgctctcatcaacaaaagagagaaagcaatgagtgctggtgaagatgcaaagaaagacttgttgggtttacttctggaatccaattttagagaaatacaagagcatggaaataccaagagcgtcggaatgagcattgaagatgtgattgatgaatgtaaaatattctactttgctggacaagaaacaaccttagttcttcttacctggaccatgattttattggctcagtatccgaattggcaagcacgcgcaagagaagaggttgtgcaagtctttggtaacaaaaaaccacatttcgatgggctaaatcaccttaaagttgttaccatgattttgtatgaagttcttaggttatacccgccagtaattacgcttaatcgagatgttcatgaagaaataaagcttggaaatttgctattacctgccggagtgcaggtctcgttgccaacaatcctccttcaccaagaccatgaactatggggtgatgatgcctctgagttcaaaccagagaggtttgctgaaggtgtttcaaaggcaacaaagagtcaagtctcattccttccatttggatggggtcctcgaatatgcgttggacaaaactttgctttgattgaagcaaaaatggctttggcaatggttttacagcgctactcttttgagctctctccgtcgtatattcatgctcctcgcacagtcataactcttcagccacagcacggtgctccaatgatattacgtaaactctaa

SEQ ID NO: 235 - protein, 421 aa, Populus balsamifera subsp. trichocarpa
  misc_feature (1)..(421): Ceres GDNA ANNOT ID no. 1482371
MWIGPKPRVNIMNPDQIRDVFMKINEYKKPSHPLLKLIVCGLASHEGEKWAKHRKIINPAFHQEKLKLMIPAFYESCSGMINKWEKLVSVDEGPCELDVWPDLQGLTCDAISRTSFGSNYEEGKRIFDLLKELTNLTAHVIIKAIVIPGYRFLPIPSNRRLKAIDKEIKASLNALINKREKAMSAGEDAKKDLLGLLLESNFREIQEHGNTKSVGMSIEDVIDECKIFYFAGQETTLVLLTWTMILLAQYPNWQARAREEVVQVFGNKKPHFDGLNHLKVVTMILYEVLRLYPPVITLNRDVHEEIKLGNLLLPAGVQVSLPTILLHQDHELWGDDASEFKPERFAEGVSKATKSQVSFLPFGWGPRICVGQNFALIEAKMALAMVLQRYSFELSPSYIHAPRTVITLQPQHGAPMILRKL

SEQ ID NO: 236 - DNA, 1557 bp, Populus balsamifera subsp. trichocarpa
  misc_feature (1)..(1557): Ceres GDNA ANNOT ID no. 1482362
atgactgtaacagtcacttcaattctagtctccattgtttatgttgcagtgctaagatgggcatggagagttttgaactgggtttggtttcggccgaagaaggtcgagaggtgcttgagacaacaaggttttgcaggcaagccttacaggcttttgttcggagactggaaagaaagttcagatatgttgaaagaagcaaggaccaaacccattggtttatcagacgctcttctacctcgtgtcatgcccttcctccatcaactggtcaaggattatggtaagaattcatttatgtgggttgggccgaaaccaagagtgaacatcatgaaccctgatcagataagggacgtattcatgaagataaatgaatatcagaaggcctctcacccgctgttgaaacttatagtatgtggacttgcaagtcacgagggtgaaaaatgggctaaacatagaaagataatcaacccagcattccatcaagagaagctaaagcttatgatacctgcgttttccgaaagttgtagcgggatgattaacaagtgggagaagctggtctctgtagacgagggctcatgtgaattggatgtctggcctgatcttcaaggcttaacatgtgatgctatttctcgaacgtcgtttggaagtaattacgaagaaggaaaaagaatatttgatctcctcaaggaacttaccgatcttacagctcatgttataataaaagctattgtcataccagggtacaggtttctgccgatcccatctaatagaaggctaaaagctattgacaaagaaataaaagcttctcttaatgctctcatcaacaaaagagagaaagcaatgagtgctggtgaagatgcaaagaaagacttgttgggtttacttctggaatccaattttagagaaatacaagagcatggaaataccaagagcgtcggaatgagcattgaagatgtgattgatgaatgtaaaatattctactttgctggacaagaaacaaccttagttcttcttacctggaccatggttttattggctcagtatccgaattggcaagcacgcgcaagagaagaggttgtgcaagtctttggtaacaaaaaaccagatttcgatgggctaaatcaccttaaagttgttaccatgattttgtatgaagttcttaggttatacccgccggtaattatgcttaatcgagatgttcatgaagaaataaagcttggaaatttgctattacctgccggagtgcaggtctcgttgccaataatcctccttcaccaagatcatgaactatggggtgatgatgcctctgagttcaaaccagagaggtttgctgaaggtatttcaaaggcaacaaagagtcaggtctcattccttccatttggatggggtcctcgaatatgcgttggacaaaactttgctttgattgaagcaaaaatggctttggcaatggttttacagcgctactcttttgagctctctccgtcgtatattcatgctcctcgcacagtcataactcttcagccacagcacggtgctccaatgatattacgtaaactctaa

SEQ ID NO: 237 - protein, 518 aa, Populus balsamifera subsp. trichocarpa
  misc_feature (1)..(518): Ceres GDNA ANNOT ID no. 1482362
MTVTVTSILVSIVYVAVLRWAWRVLNWVWFRPKKVERCLRQQGFAGKPYRLLFGDWKESSDMLKEARTKPIGLSDALLPRVMPFLHQLVKDYGKNSFMWVGPKPRVNIMNPDQIRDVFMKINEYQKASHPLLKLIVCGLASHEGEKWAKHRKIINPAFHQEKLKLMIPAFSESCSGMINKWEKLVSVDEGSCELDVWPDLQGLTCDAISRTSFGSNYEEGKRIFDLLKELTDLTAHVIIKAIVIPGYRFLPIPSNRRLKAIDKEIKASLNALINKREKAMSAGEDAKKDLLGLLLESNFREIQEHGNTKSVGMSIEDVIDECKIFYFAGQETTLVLLTWTMVLLAQYPNWQARAREEVVQVFGNKKPDFDGLNHLKVVTMILYEVLRLYPPVIMLNRDVHEEIKLGNLLLPAGVQVSLPIILLHQDHELWGDDASEFKPERFAEGISKATKSQVSFLPFGWGPRICVGQNFALIEAKMALAMVLQRYSFELSPSYIHAPRTVITLQPQHGAPMILRKL

SEQ ID NO: 238 - DNA, 1557 bp, Populus balsamifera subsp. trichocarpa
  misc_feature (1)..(1557): Ceres GDNA ANNOT ID no. 1489077
atgactgtgacagtcacttcaattctagtctccattgtttatgttgcagtgctaagatgggcatggagggttttgaactgggtttggtttcggccgaagaaggtcgagaggtgcttgagacaacaaggttttgcaggcaagccttacaggcttttgtttggagactggaaagaaaattcagatatgttgaaggaagcaaggaccaaacccattggtttatcagacgctcttctacctcgtgtcatgcccttcctccatcaactggtcaaggattatggtaagaattcatttatgtggattgggccgaaaccaagagtgaacatcatgaaccctgatcagataagggacgtattcatgaagataaatgaatatcagaagccctcgcacccgctgttgaaacctctagcatgtggacttgcaagtcacgagggtgaaaaatgggctaaacatagaaagataatcaacccagcattccatcaagagaagctaaagcttatgattcctgcgttttacgaaagttgtagtgggatgattaacaagtgggagaagctggtctctgtagacgagggttcatgtgaattggatgtctggcctgatcttcaaggcttaacatgtgatgctatttctcgaacgtcgtttggaagtaattacgaagaaggaaaaagaatatttgatctcctcaaggaacttaccgatcttacagttcatgttataataaaagcatttgtcataccagggtacaggtttctgccgatcccaactaatagaaggctaaaagctattgacaaagaaataaaagcttctcttaatgctctcatcaacaaaagagagaaagcaatgagtgctggtgaagatgcaaagaatgacttgttgggtttacttctggaatccaattttagagaaatacaagagcatggaaataccaagagcgtccgaatgagcattgaagatgtgattgacgaatgtaaaatattctactttgctggacaagaaacaacctcagttcttcttacctggaccatggttttattggctcagtatccgaattggcaagcacgcgcaagagaagaggttgtgcaagtctttggtaacaaaaaaccagatttcgatgggctaaatcaccttaaagttgttaccatgattttgtatgaagttcttaggttatacccgccagtaattatgcttaatcgagatgttcatgaagaaataaagcttggaaatttgctattacctgccggagtgcagatctcgttgccaacaatcctccttcaccaagatcatgaactatggggtgatgatgcctctgagttcaaaccagagaggtttgctgaaggtgtttcaaaggcaacaaagagtcaagtctcattccttccatttggatggggtcctcgaatatgcgttggacaaaactttgctttgattgaagcaaaaatggctttggcaatggttttacagcgctactcttttgagctctctccgtcgtatattcatgctcctcgcacagtcataactcttcagccacagcacggtgctccaatgatattacgtaaactctaa

SEQ ID NO: 239 - protein, 457 aa, Populus balsamifera subsp. trichocarpa
  misc_feature (1)..(457): Ceres GDNA ANNOT ID no. 1489077
MLKEARTKPIGLSDALLPRVMPFLHQLVKDYGKNSFMWIGPKPRVNIMNPDQIRDVFMKINEYQKPSHPLLKPLACGLASHEGEKWAKHRKIINPAFHQEKLKLMIPAFYESCSGMINKWEKLVSVDEGSCELDVWPDLQGLTCDAISRTSFGSNYEEGKRIFDLLKELTDLTVHVIIKAFVIPGYRFLPIPTNRRLKAIDKEIKASLNALINKREKAMSAGEDAKNDLLGLLLESNFREIQEHGNTKSVRMSIEDVIDECKIFYFAGQETTSVLLTWTMVLLAQYPNWQARAREEVVQVFGNKKPDFDGLNHLKVVTMILYEVLRLYPPVIMLNRDVHEEIKLGNLLLPAGVQISLPTILLHQDHELWGDDASEFKPERFAEGVSKATKSQVSFLPFGWGPRICVGQNFALIEAKMALAMVLQRYSFELSPSYIHAPRTVITLQPQHGAPMILRKL

SEQ ID NO: 240 - DNA, 1557 bp, Populus balsamifera subsp. trichocarpa
  misc_feature (1)..(1557): Ceres GDNA ANNOT ID no. 1482356
atgacagtaacagtctcttcaattctagtctccattgtttatgttgcagtgctaagatgggcatggagagttttgaactgggtttggtttcggccgaagaaggtcgagaggtgcttgagacaacaaggttttgcaggcaagccttacaggcttttgttcggagactggaaagaaagttcagatatgttgaaagaagcaaggaccaaacccattggtttatcagacgctcttctacctcgtgtcatgcccttcctccatcaactggtcaaggattatggtaagaattcatttatgtgggttgggccgaaaccaagagtgaacatcatgaaccctgatcagataaaggacgtattcatgaagataaatgaatatcagaagccctcgcacccgctgttgaaagctctagcatgtggacttccaagtcacgagggtgaaaaatggtctaaccatagaaagataatcaacccagcattccatcaagagaagataaagcttatgatacctgcattttacgaaagttgtagtgggatgattaacaagtgggagaagctggtctctatagacgaggggtcatgtgaattggatgtctggcctgatcttcaaggcttaacatgtgatgctatttctcgaacgtcgtttggaagtaattacgaagaaggaaaaagaatatttgacctcctcaaggaacttaccgatcttacagttcatgttataataaaagcaattgtcataccagggtacaggtttctgccgatcccatctaatagaaggctaaaagctattgacaaagaaataaaagcttctcttaatgctctcatcaacaaaagagagcaagcaatgagtgctggtgaagatgcaaagaatgacttgttgggtttacttctggaatccaattttagagaaatacaagagcatggaaatacgaagagcgtcggaatgagcattgaagatgtgattgacgaatgtagaatattctactttgctggacaagaaacaaccacagttcttcttacctggaccatggttttattggctcagtatccgaattggcaagcacgcgcaagagaagaggttgtgcaagtctttggtaacaaaaaaccagattttgatgggctaaatcaccttaaagttgttaccatgattttttatgaagttcttaggttatacccgccggtaattatgcttaatcgagatgttcatgaagaaataaagcttggaaatttgctattacctgccggagtgcaggtctcggtgccaacaatcctccttcaccaagatcatgaactatggggtgatgatgcctctgagttcaaaccagggaggtttgctgaaggtgtttcaaaggcaacaaagagtcaagtctcattccttccatttggatggggtcctcgaatatgcgttggacagaactttgctttgattgaagcaaaaatggctttggcaatgattttacagcgctgctcttttgagctctctccgtcgtatattcatgctcctcgcacagtcataactcttcagccacagcacggtgctccaatgatattacgtaaactctaa

SEQ ID NO: 241 - protein, 518 aa, Populus balsamifera subsp. trichocarpa
  misc_feature (1)..(518): Ceres GDNA ANNOT ID no. 1482356
MTVTVSSILVSIVYVAVLRWAWRVLNWVWFRPKKVERCLRQQGFAGKPYRLLFGDWKESSDMLKEARTKPIGLSDALLPRVMPFLHQLVKDYGKNSFMWVGPKPRVNIMNPDQIKDVFMKINEYQKPSHPLLKALACGLPSHEGEKWSNHRKIINPAFHQEKIKLMIPAFYESCSGMINKWEKLVSIDEGSCELDVWPDLQGLTCDAISRTSFGSNYEEGKRIFDLLKELTDLTVHVIIKAIVIPGYRFLPIPSNRRLKAIDKEIKASLNALINKREQAMSAGEDAKNDLLGLLLESNFREIQEHGNTKSVGMSIEDVIDECRIFYFAGQETTTVLLTWTMVLLAQYPNWQARAREEVVQVFGNKKPDFDGLNHLKVVTMIFYEVLRLYPPVIMLNRDVHEEIKLGNLLLPAGVQVSVPTILLHQDHELWGDDASEFKPGRFAEGVSKATKSQVSFLPFGWGPRICVGQNFALIEAKMALAMILQRCSFELSPSYIHAPRTVITLQPQHGAPMILRKL

SEQ ID NO: 242 - DNA, 1385 bp, Populus balsamifera subsp. trichocarpa
  misc_feature (1)..(1385): Ceres GDNA ANNOT ID no. 1484293
atgacagtgacagtcacttcaattctagtctccattgtttatgttgcagtggtaagatgggcatggagagttttgaactgggtttggtttcggccgaagaaggtcgagaggtgcttgagacaacaaggttttgcaggcaagccttacaggcttttgttcggagactggaaagaaagttcagatatgatgaaagaagcaaggaccaaacccattggtttatcagacgctcttctacctcgtgtcatgcccttcctccatcaactggtcaaggattatggtaagaattcatttatgtggattgggccgaaaccaagagtgaacatcatgaaccctgatcagataagggacgtattcatgaagataaatgaatataagaagccctcgcacccgctgttgaaacttatagtatgtggacttgcaagtcacgagggtgaaaaatgggctaaacatagaaagataatcaacccagcattccatcaagagaagctaaagcttatgatacctgcgttttacgaaagttgtagtgggatgattaacaagtgggagaagctggtctctgtagacgaggggccatgtgaattggatgtctggcctgatcttcaaggcttaacttgtgatgctatttctcgaacgtcgtttggaagtaattacgaagaaggaaaaagaatatttgatctcctcaaggaacttaccaatcttacagctcatgttataataaaagctattgtcataccagggtacaggtttctgccgatcccatctaatagaaggctaaaagctattgacaaagaaataaaagcttctcttaatgctctcatcaacaaaagagagaaagcaatgagtgctggtgaagatgcaaagaaagacttgttgggtttacttctggaatccaattttagagaaatacaagagcatggaaataccaagagcgtcggaatgagcattgaagatgtgattgacgaatgtaaaatattctactttgctggacaagaaacaaccttagttcttcttacctggaccatgattttattggctcagtatccgaattggcaagcacgcgcaagagaagaggttgtgcaagtctttggtaacaaaaaaccagatttcgatgggctaaatcaccttaaagttgttaccatgattttgtatgaagttcttaggttatacccgccagtaattacgcttaatcgagatgttcatgaagaaataaagcttggaaatttgctattacctgccggagtgcaggtctcgttgccaacaatcctccttcaccaagaccatgaactatggggtgatgatgcctctgagttcaaaccagagaggtttgctgaaggtgtttcaaaggcaacaaagagtcaagtctcattccttccatttggatgggg

SEQ ID NO: 243 - protein, 400 aa, Populus balsamifera subsp. trichocarpa
  misc_feature (1)..(400): Ceres GDNA ANNOT ID no. 1484293
MMKEARTKPIGLSDALLPRVMPFLHQLVKDYGKNSFMWIGPKPRVNIMNPDQIRDVFMKINEYKKPSHPLLKLIVCGLASHEGEKWAKHRKIINPAFHQEKLKLMIPAFYESCSGMINKWEKLVSVDEGPCELDVWPDLQGLTCDAISRTSFGSNYEEGKRIFDLLKELTNLTAHVIIKAIVIPGYRFLPIPSNRRLKAIDKEIKASLNALINKREKAMSAGEDAKKDLLGLLLESNFREIQEHGNTKSVGMSIEDVIDECKIFYFAGQETTLVLLTWTMILLAQYPNWQARAREEVVQVFGNKKPDFDGLNHLKVVTMILYEVLRLYPPVITLNRDVHEEIKLGNLLLPAGVQVSLPTILLHQDHELWGDDASEFKPERFAEGVSKATKSQVSFLPFGW

SEQ ID NO: 244 - protein, 403 aa, Triticum aestivum
  misc_feature (1)..(403): Ceres CLONE ID no. 903520
MSSKLARDVEKFKFPALTRLLADGVGNYEGDRWAKHRRILNPAFHAEKLKLMFPAFTACCEELVGRWEQSLGPDGSWEVDVCPELQSLTGDVISQTAFGSSYLEGRRIFQLQTEQIARFMAAVSKIMIPGYMSFPTKNNRRMHQINNEIESILRGIIAKRMHAIHEGESTKDDLLGLLLESNMSDTDENGQSTLGMSADEVMEECKLFYFAGMETTSILLTWTMIVLSMHPEWQDRAREEVLGLFGKHKLEYEGVNRLKIVTMILYEVLRLYPPATVFTRKTYKKIEIGGIMYPAGVMFEMPVLYIHHDTDIWGEDVHEFNPDRFAEGISKASKDPGAFFPFGWGPRICIGQNFALLEAKMALCMILQRFEFELAPSYTHTPHSVMMLRPMHGAQIRLHTISS

SEQ ID NO: 245 - protein, 432 aa, Zea mays
  misc_feature (1)..(432): Ceres CLONE ID no. 1601097
MFHNAVKENGTNSFTWFGPIPRVIIPDPELMREVLSNKFGHFGKPLFSRVGKLLANGLANHEGEKWAKHRRILNPAFHHEKIKRMLPVFATCCADMINRWENSMSSKEPSEMDVWPEFQNLTGDVISRTAFGSNYQEGRNIFQLQGEQAERLIQSFQTIFIPGYWLLPTKNNRRMKEIDREIRKILHGIIRKRERAFIDSEGTNDDLLGLLVESNMRESNGNAKLGMTTEDIIEECKLFYFAGMETTSVLLTWTLILLSMHPEWQEQAREEVLNHFGMGTPDFDNLNRLKIVTMILYEVLRLYPPVVFLSRRTYKEMELGGIKYPSGVSLLLPIIFIHHDPNIWGKDASEFNPQRFEDGISNATKHQAAFFPFGWGPRICIGQNFALLEAKMALSTILQRFSFELSSSYTHAPYTVITLHPQHGAQIRLKKL

SEQ ID NO: 246 - protein, 554 aa, Oryza sativa subsp. japonica
  misc_feature (1)..(554): Public GI no. 54290354
MQREKEAMGIGIGIGIGIGIGTGTGAALPFGEASPWSLLGGAVAALLLVWAAQMLEWAWLAPRRMERALRAQGLRGTQYRFLHGDLTEDLRLVTAARSKPVPMDRPHDFIPRVAPLLHRALEEHGRVSFTWFGPMPRVTITDPDLVREVLSNKFGHFEKTKLATRLSKLLVGGLVILHGEKWVKHRRIMNPAFHAEKLKRMLPAFSASCSELIGRWENAVAASVGKAELDIWPDFQNLSGDVISRAAFGVRHHEGRQIFLLQAEQAERLVQSFRSNYIPGLSLLPTENNRRMKAIDREIKSILRGIIEKRQKATKNGEASKDDLLGLLLQSNMDYYSDEDGKSSKGMTVEEIIDECKLFYFAGMETTAVLLTWTMVALSMHPEWQDRAREEILQVFGRNKPDINGVSRLKVVTMVLHEVLRLYPPVVMMNRRTYKEIELGGVRYPAGVMLSLPVLFIHRDAAAWGHDAGEFDPGRFAEGVARACKDPGAGAFFPFSWGPRICIGQNFALLEAKVALGMILQRFAFELSPAYAHAPYTVLTLHPQHGVPVRLRRL

SEQ ID NO: 247 - protein, 523 aa, Glycine max
  misc_feature (1)..(523): Ceres CLONE ID no. 479101
MEAPWATTSSSIVFVIVILALTSWAWRMLNWLWIRPKRLERLLREQGLQGNPYRILVGDLKEIVKLQMEARSKPMNLSHDIVPRVFAHLHQSVLKHGKNSFIWFGPKPRVTLTDPELIKDVLNKISDFRKPEANPLAKLLATGLVNYDGEKWNKHRRLINPAFSLEKLKIMLPIFFKSCNDLIIKWEGMLSYDGSCEMDVWPFLQNLASDVIARTAFGSSFEEGKRIFQLQKELAELTMKVIMKVYIPGWRFVPTATNRRMKEIDRYIKASLTDMIKKREKAPKTGEATRDDLLGILLESNHKEIQEHRNNENVGMNLNDVIEECKLFYFAGQETTSVLLVWTMVLLSRYPDWQSRAREEVLQVFGKQAPNFDGLSHLKIVTMILYEVLRLYPPGIGLTRSVHRDMKLGNLTLPAGVQVSLPIIMVHHDRELWGDDAKEFNPERFSEGVSKATNGRVSFFPFGWGPRICIGQNFSLLEAKMALSMILQHFSFELSPAYTHAPFTVITLQPQYGAHVILRKVEM

SEQ ID NO: 248 - protein, 544 aa, Oryza sativa subsp. japonica
  misc_feature (1)..(544): Public GI no. 34912880
MGIGIGIGIGIGIGTGTGAALPFGEASPWSLLGGAVAALLLVWAAQMLEWAWLAPRRMERALRAQGLRGTQYRFLHGDLTEDLRLVTAARSKPVPMDRPHDFIPRVAPLLHRALEEHGRVSFTWFGPMPRVTITDPDLVREVLSNKFGHFEKTKLATRLSKLLVGGLVILHGEKWVKHRRIMNPAFHAEKLKRMLPAFSASCSELIGRWENAVAASVGKAELDIWPDFQNLSGDVISRAAFGVRHHEGRQIFLLQAEQAERLVQSFRSNYIPGLSYENNRRMKAIDREIKSILRGIIEKRQKATKNGEASKDDLLGLLLQSNMDYYSDEDGKSSKGMTVEEIIDECKLFYFAGMETTAVLLTWTMVALSMHPEWQDRAREEILQVFGRNKPDINGVSRLKVVTMVLHEVLRLYPPVVMMNRRTYKEIELGGVRYPAGVMLSLPVLFIHRDAAAWGHDAGEFDPGRFAEGVARACKDPGAGAFFPFSWGPRICIGQNFALLEAKVALGMILQRFAFELSPAYAHAPYTVLTLHPQHGVPVRLRRL

SEQ ID NO: 249 - protein, 527 aa, Zea mays
  misc_feature (1)..(527): Ceres CLONE ID no. 1589607
MATCVLLMLREVSPWALASVVASVSLLWLVVWTLEWAWWTPWRLERALRVQGLKGTRYRLFTGDLRETARANREARKKPLPLGSHDIAPRVQPMHHSTIKEYGKLSFTWFGPTPRVMIPDPELVKEVLSNKFGHFGKPRSNRIGRLLANGLVNHDGEKWAKHRRILNPAFHHEKIKGMMPVFSTCCIEMITRWDNSMPSEGSSEIDVWPEFQNLTGDVISRTAFGSNYQEGRRIFELQGELAERLIQSVQTIFIPGYWFLPTKNNRRMRAIDVEIRKILREIIGKREKDTKNRETNNDDLLGLLLESNTRQSNGNASLGLTTEDVIEECKLFYFAGMETTSVLLTWTLIVLSMHPEWQERAREEVLSHFGRTTPDYDSLSRLKTITMILHEVLRLYPPATFLTRRTYKEMELGGIKYPAGVDLLLPVIFIHHDPDIWGKDASEFNPERFANGISSATRHQAAFFPFGGGPRICIGQSFALLEAKMTLCTILQRFSFELSPSYTHAPYTVITLHPQHGAQIRLKKLSP

SEQ ID NO: 250 - protein, 528 aa, Zea mays
  misc_feature (1)..(528): Public GI no. 21842133
MATLPLLLHLLWEASPWARAGAATAAVVLVWLAAWTLEWAWWTPRRLDRALRAQGLKGTRYRLLTGDVRENARLNREARTKPLPLGSHDIIPRVLPMFHNAVKENGTNSFTWFGPIPRVIIPDPELMREVLSNKFGHFGKPLFSRVGKLLANGLANHEGEKWAKHRRILNPAFHHEKIKGMLPVFATCCADMINRWENSMSSKEPSEMDVWPEFQNLTGDVISRTAFGSNYQEGRNIFQLQGEQAERLIQSFQTIFIPGYWFLPTKNNRRMKEIDREIRKILHGIIRKRERAFIDSEGTNDDLLGLLVESNMRESNGNAKLGMTTEDIIEECKLFYFAGMETTSVLLTWTLILLSMHPEWQEQAREEVLNHFGMGTPDFDNLNRLKIVTMILYEVLRLYPPVVFLSRRTYKEMELGGIKYPSGVSLLLPIIFIHHDPNIWGKDASEFNPQRFEDGISNATKHQAAFFPFGWGPRICIGQNFALLEAKMALSTILQRFSFELSSSYTHAPYTVITLHPQHGAQIRLKKL

SEQ ID NO: 251 - DNA, 1482 bp, Arabidopsis thaliana
  misc_feature (1)..(1482): Ceres CDNA ID no. 12660455
  misc_feature (1)..(1482): Also Known As  Ceres SEEDLINE ME04651
gaaaagtctatggcggagacaacgagttggatcccagtatggtttcctctgatggtgttgggatgttttggtctgaattggttggtcaggaaggtgaatgtgtggctctatgagtccagccttggggagaacaggcactatctgccaccaggtgatttgggttggcctttcattggcaacatgttgtcttttctcagagctttcaagacttctgaccctgactccttcactcgcactttaatcaaaaggtatggacctaaaggtatatataaagcacacatgttcgggaacccaagtataatagtaacaacatcagacacttgccggcgtgtgctgacagacgatgatgcgttcaagccaggttggccaacatctacaatggaactcattggaaggaagtcattcgttggtatctctttcgaggaacacaagcgtctcaggcgtttgactgctgctccagtcaatggccatgaagccctctctacttatataccgtacattgaagaaaacgttattactgttctggacaagtggaccaaaatgggagagttcgagttcttgactcatctgcgtaagctcacctttaggatcatcatgtacatctttctcagctctgagagtgagaatgtaatggatgcattggaacgagaatatacagctcttaactatggggttcgagcaatggcagtcaatattcctggatttgcttatcatagagcactcaaggcgaggaaaacacttgtagctgcctttcagtccatagtgactgagcgcagaaatcaaaggaagcagaacattttatcaaataagaaagatatgttagacaatcttcttaatgttaaagatgaagatggaaaaactttggatgacgaagagattatcgatgttcttctgatgtatcttaatgccggtcatgaatcctctggccacaccattatgtgggctaccgtttttctacaagaacaccctgaggttctacaaagagcaaaggctgaacaagaaatgatcctgaaaagtaggcctgaaggtcaaaaaggtctatctctaaaagaaacccggaaaatggaattcttatcgcaggttgtcgatgagacacttcgagtcataacattctcactcactgcttttcgagaggcaaagactgacgttgaaatgaatggctatttgatcccaaaaggttggaaggttttgacatggtttagggatgtccacatcgaccctgaagtctttccagatccaagaaaatttgatcctgctagatgggataatggtttcgtaccaaaagctggtgcgttccttccttttggtgctggaagccatctatgcccgggaaatgatctggctaagctcgagatttcaatttttcttcatcatttcctcctcaaatatcaggtgaaacggagcaaccccgaatgtccagtgatgtatctgcctcataccagaccaactgataattgcttggcaagaattagttatcagtaa

SEQ ID NO: 252 - protein, 490 aa, Arabidopsis thaliana
  misc_feature (1)..(490): Ceres CDNA ID no. 12660455
  misc_feature (1)..(490): Also Known As  Ceres SEEDLINE ME04651
  misc_feature (46)..(484): Pfam Name: p450 Pfam Description: Cytochrome P450
  misc_feature: Phenotype: Late Flowering Useful for delaying flowering time
  misc_feature: Phenotype: Large Useful for making larger plants
  misc_feature: Phenotype: Yellow-Green Viable 1 Useful for making lethal plants for genetic confinement systems
  misc_feature: Phenotype: ROSETTE LEAVES Useful for making ornamental plants with modified leaves
  misc_feature: Phenotype: Curled 4 Useful for making plants with altered leaf shape e.g., curled leaves
  misc_feature: Phenotype: Short Useful for making shorter plants
  misc_feature: Phenotype: Strong Useful for making stronger plants
MAETTSWIPVWFPLMVLGCFGLNWLVRKVNVWLYESSLGENRHYLPPGDLGWPFIGNMLSFLRAFKTSDPDSFTRTLIKRYGPKGIYKAHMFGNPSIIVTTSDTCRRVLTDDDAFKPGWPTSTMELIGRKSFVGISFEEHKRLRRLTAAPVNGHEALSTYIPYIEENVITVLDKWTKMGEFEFLTHLRKLTFRIIMYIFLSSESENVMDALEREYTALNYGVRAMAVNIPGFAYHRALKARKTLVAAFQSIVTERRNQRKQNILSNKKDMLDNLLNVKDEDGKTLDDEEIIDVLLMYLNAGHESSGHTIMWATVFLQEHPEVLQRAKAEQEMILKSRPEGQKGLSLKETRKMEFLSQVVDETLRVITFSLTAFREAKTDVEMNGYLIPKGWKVLTWFRDVHIDPEVFPDPRKFDPARWDNGFVPKAGAFLPFGAGSHLCPGNDLAKLEISIFLHHFLLKYQVKRSNPECPVMYLPHTRPTDNCLARISYQ

SEQ ID NO: 253 - DNA, 1482 bp, Populus balsamifera subsp. trichocarpa
  misc_feature (1)..(1482): Ceres GDNA ANNOT ID no. 1525729
atggagtcgggatctatctgggtggtcctagcagtcatatttggtggattaggggttgggaaatggattctaaagaaagtgaattggtggttgtatgaagcccaactgggtgaaaagcagtactcactacctccaggggatttgggctggcctttcattggcaatatgtggtcctttctcagagctttcaaatccagcgatcctgattctttcatgcgcaccttcatcaacaaatatggagataatggaatctacaaggccttcatgtttgggaacccgagtgtattcgtaacaacacctgaagcatgcagaagagtattaagtaacgatgatgcatttaagcctggatggccaatttccacactgaagcttatcggaaggaaatccttcattgatatttcttacgaagagcacaagcgccttcgccgtctgacgtccgctcctgtcaatggtcatgaagcgttgtccgtttacattccatatatagaagaaaatgtgatagctatgttggaaaaatggaccacaatggggaagatcgagttcttgactcaagtgagaaaacttaccttcaaaataatcatgtatatatttcttagctctgagagtgaggtggtcatggaggctttggagaaggattacaccactcttaattatggagtcagagccatggcgatcaatcttcctggattcgcttactataaagcattgaaggcccgcaaaagacttgtcgctatattccaatctatagtggatgagcgtagaaatttaaggaagaacagtgctcgtaacgcaaagaagaaagacatgatggactctctgttgggtgttgaagatgaaaatggtaggaaattgactgatgaagaaatcatagatgtaattttgatgtacttgaatgcaggccatgaatcctctggccatatcacgacatgggctactatttttctccaggaacatccagaatttctccaaaaagctaaggaagagcaagaacagattgtaaaaaggaggccaccagcacaaaatggattgtcacttaaggaagttcgagaaatggattatctttccaaggtgattgatgaaacacttcgtttgatcacattctcgcttactgttttccgagaagcaaaaacagatttcagtataaacggatacatcattccaaagggttggaaagttctggtttggttcaggacagttcatttggatccagaaatctatcaaaatccaaaggaatttaatccttctagatgggataattacacccccaaagcagggactttccttccttttggagctggaagcaggctgtgccctggaaatgatcttgccaagcttgaaatatctatttttctgcattattttcttcttgattatatgctcgaacgtgaaaatcctgaatgtcgttggatgttcctccctcataccagaccaacagacaactgtgtggctagaatcaagaaagtttcatccacatctgtataa

SEQ ID NO: 254 - protein, 438 aa, Populus balsamifera subsp. trichocarpa
  misc_feature (1)..(438): Ceres GDNA ANNOT ID no. 1525729
  misc_feature (1)..(438)
  Functional Homolog of CDNA ID no. 12660455at SEQ ID no. 252with e-value of 5.7E-177 and percent identity of 74.13
MWSFLRAFKSSDPDSFMRTFINKYGDNGIYKAFMFGNPSVFVTTPEACRRVLSNDDAFKPGWPISTLKLIGRKSFIDISYEEHKRLRRLTSAPVNGHEALSVYIPYIEENVIAMLEKWTTMGKIEFLTQVRKLTFKIIMYIFLSSESEVVMEALEKDYTTLNYGVRAMAINLPGFAYYKALKARKRLVAIFQSIVDERRNLRKNSARNAKKKDMMDSLLGVEDENGRKLTDEEIIDVILMYLNAGHESSGHITTWATIFLQEHPEFLQKAKEEQEQIVKRRPPAQNGLSLKEVREMDYLSKVIDETLRLITFSLTVFREAKTDFSINGYIIPKGWKVLVWFRTVHLDPEIYQNPKEFNPSRWDNYTPKAGTFLPFGAGSRLCPGNDLAKLEISIFLHYFLLDYMLERENPECRWMFLPHTRPTDNCVARIKKVSSTSV

SEQ ID NO: 255 - DNA, 1494 bp, Populus balsamifera subsp. trichocarpa
  misc_feature (1)..(1494): Ceres GDNA ANNOT ID no. 1470773
atggggttgggatccatatgggtggtcttagtagtcatattttgtggattaggggttggacaatggattctaaagagagtgaattggtggttgtatgaagctaagctaggggcaaagaaggattcacttcctccaggggatttgggctggcctttcattgggaatatgtggtcctttctcacagctttcaaatccagtgatcctgattctttcatccgcagcttcgtgaatagatatggacatactggaatctataaggccttcatgttcgggaaccctagtgtgttggtaacaactcctgaaggatgcagaagattattaaccgatgacaatgcatttaaacctggttggccacttgctacattgaagctcattggagagaaatcctttattgatattccttacgaagagcacaagcgccttcgccgcttgacatccgcatctgtcaatggtcatgaagcattgtctacttacattccatatatagaacaaaatgttatagctgagttggaaaagtggaccaccatgggacaaattgagttcttgactaaaatgagaaaacttacctttagaataatcatttatatatttcttagcaaaacaagtgagagggtcatggaggctttggagaaggaatacaccactcttaattatggaatcagagccatggcaatcaatcttccaggatttgcttattatgaagcgttaaaggctcgtaaaaaacttgtggctatattccaatctattgtggatgggcgtagaaatctaaagaaggatgatgttacaaacacaaagaagaaagatatgatggactctctgttggatgttgaggatgaaaatggtaggaaattgaccgatgaagaagtcattgatattatgttgatgtacttgaatgcaggccacgaatcttccggccatatcacaacatgggccactattttcctccaggaccaccctgaatatttccaaaaagctaaggaagagcaagaacaaattataaaaagaaggccactaacacaaaagagattgtcacttaaggaagtccgagaaatgaaatatctttccaaggtaattgatgaaactcttcgtatggtaacattctctctcactgtatttcgagaagcaaaaacagatttttgtatgaatggttataccattccaaaaggttggaaagttctggcttggtttaggacaattcacttggatccagaagtctatccaaatccaaaggaatttaatccttctagatgggatgattacacacccaaagcagggactttcctcccttttggagctggaagcaggctgtgccctggaaataatcttgccaagcttgaaatatctatttttctacattattttctcctagattataggcaagtctctctctattgtatattgcttgaagctcatattatactcgttttacctacttgcttgaacgtcagaatccagaatgttcttggagattcctaccccatacaagaccaatag

SEQ ID NO: 256 - protein, 442 aa, Populus balsamifera subsp. trichocarpa
  misc_feature (1)..(442): Ceres GDNA ANNOT ID no. 1470773
  misc_feature (1)..(442)
  Functional Homolog of CDNA ID no. 12660455at SEQ ID no. 252with e-value of 2.6E-158 and percent identity of 70.47
MWSFLTAFKSSDPDSFIRSFVNRYGHTGIYKAFMFGNPSVLVTTPEGCRRLLTDDNAFKPGWPLATLKLIGEKSFIDIPYEEHKRLRRLTSASVNGHEALSTYIPYIEQNVIAELEKWTTMGQIEFLTKMRKLTFRIIIYIFLSKTSERVMEALEKEYTTLNYGIRAMAINLPGFAYYEALKARKKLVAIFQSIVDGRRNLKKDDVTNTKKKDMMDSLLDVEDENGRKLTDEEVIDIMLMYLNAGHESSGHITTWATIFLQDHPEYFQKAKEEQEQIIKRRPLTQKRLSLKEVREMKYLSKVIDETLRMVTFSLTVFREAKTDFCMNGYTIPKGWKVLAWFRTIHLDPEVYPNPKEFNPSRWDDYTPKAGTFLPFGAGSRLCPGNNLAKLEISIFLHYFLLDYRQVSLYCILLEAHIILVLPTCLNVRIQNVLGDSYPIQDQ

SEQ ID NO: 257 - DNA, 1482 bp, Populus balsamifera subsp. trichocarpa
  misc_feature (1)..(1482): Ceres GDNA ANNOT ID no. 1524187
atggggttgggatccatatgggtggtcttagtagtcatattttgtggattaggggttggacaatggattctaaagagagtgaattggtggttgtatgaagctaagctaggggcaaagaaggattcacttcctccaggggatttgggctggcctttcattgggaatatgtggtcctttctcacagctttcaaatccagtgatcctgattctttcatccgcagcttcgtgaatagatatggacatactggaatctataaggccttcatgttcgggaaccctagtgtgttggtaacaactcctgaaggatgcagaagattattaaccgatgacaatgcatttaaacctggttggccacttgctacattgaagctcattggagagaaatcctttattgatattccttacgaagagcacaagcgccttcgccgcttgacatccgcatctgtcaatggtcatgaagcattgtctacttacattccatatatagaacaaaatgttatagctgagttggaaaagtggaccaccatgggacaaattgagttcttgactaaaatgagaaaacttacctttagaataatcatttatatatttcttagcaaaacaagtgagagggtcatggaggctttggagaaggaatacaccactcttaattatggaatcagagccatggcaatcaatcttccaggatttgcttattatgaagcgttaaaggctcgtaaaaaacttgtggctatattccaatctattgtggatgggcgtagaaatctaaagaaggatgatgttacaaacacaaagaagaaagatatgatggactctctgttggatgttgaggatgaaaatggtaggaaattgaccgatgaagaagtcattgatattatgttgatgtacttgaatgcaggccacgaatcttccggccatatcacaacatgggccactattttcctccaggaccaccctgaatatttccaaaaagctaaggaagagcaagaacaaattataaaaagaaggccactaacacaaaagagattgtcacttaaggaagtccgagaaatgaaatatctttccaaggtaattgatgaaactcttcgtatggtaacattctctctcactgtatttcgagaagcaaaaacagatttttgtatgaatggttataccattccaaaaggttggaaagttctggcttggtttaggacaattcacttggatccagaagtctatccaaatccaaaggaatttaatccttctagatgggatgattacacacccaaagcagggactttcctcccttttggagctggaagcaggctgtgccctggaaataatcttgccaagcttgaaatatctatttttctacattattttctcctagattataggcttgaacgtcagaatccagaatgttcttggagattcctaccccatacaagaccaatagataattgcctggcaagaatcaagaaagtttcatccgaatctgtgtga

SEQ ID NO: 258 - protein, 438 aa, Populus balsamifera subsp. trichocarpa
  misc_feature (1)..(438): Ceres GDNA ANNOT ID no. 1524187
  misc_feature (1)..(438)
  Functional Homolog of CDNA ID no. 12660455at SEQ ID no. 252with e-value of 1.9E-169 and percent identity of 70.40
MWSFLTAFKSSDPDSFIRSFVNRYGHTGIYKAFMFGNPSVLVTTPEGCRRLLTDDNAFKPGWPLATLKLIGEKSFIDIPYEEHKRLRRLTSASVNGHEALSTYIPYIEQNVIAELEKWTTMGQIEFLTKMRKLTFRIIIYIFLSKTSERVMEALEKEYTTLNYGIRAMAINLPGFAYYEALKARKKLVAIFQSIVDGRRNLKKDDVTNTKKKDMMDSLLDVEDENGRKLTDEEVIDIMLMYLNAGHESSGHITTWATIFLQDHPEYFQKAKEEQEQIIKRRPLTQKRLSLKEVREMKYLSKVIDETLRMVTFSLTVFREAKTDFCMNGYTIPKGWKVLAWFRTIHLDPEVYPNPKEFNPSRWDDYTPKAGTFLPFGAGSRLCPGNNLAKLEISIFLHYFLLDYRLERQNPECSWRFLPHTRPIDNCLARIKKVSSESV

SEQ ID NO: 259 - protein, 496 aa, Cucurbita maxima
  misc_feature (1)..(496): Public GI no. 11934677
  misc_feature (1)..(496)
  Functional Homolog of CDNA ID no. 12660455at SEQ ID no. 252with e-value of 0 and percent identity of 63.80
MESTWAVAAVVTAVVAVATVFSVLKWAAKSLNEWIYEAKLGDRRLALPPGDLGWPLIGNMLGFLRAFKSKNPETFIDGYVSRYGKTGVYKVHLFGNPSVVVTTPETCRKVLTDDEAFQPGWPRAAVELIGEKSFIQMPQEEHKRLRRLTSAPVNGFEALSNYIPYIEKNVLESLEKWSKMGPIEFLTQLRKLTFTVIMYIFLSSESEPVMEMLEKEYTRLNYGVRDMRINLPGFAYHKALKARKNLVAALKGIVTERRRQKLDKWAPKRKDMMDQLIDIVDENGRKLDDEEIIDILIMYLNAGHESSGHTMMWATILLNQHPEVLKKAREEQEAIVRNRPAGQTGLTLKECRDMEYLSKVVDETLRYVSFSLVVFREAQMDVNLNGYLIPKGWKVLAWFRSIHYDSEVYPDPKKFEPSRWDGFVPKAGEFLPFGAGSRLCPGNDLAKLEICIFVHYFLLNYNLEWLTPDCEILYLPHSRPKDNCMAKITKKSSVAA

SEQ ID NO: 260 - protein, 488 aa, Pisum sativum
  misc_feature (1)..(488): Public GI no. 27764531
  misc_feature (1)..(488)
  Functional Homolog of CDNA ID no. 12660455at SEQ ID no. 252with e-value of 0 and percent identity of 63.99
MILEMGSMWVVLMAIGGALLVLRSILKNVNWWLYESKLGVKQYSLPPGDMGWPFIGNMWSFLRAFKSKDPDSFISSIVSRYGSSGIYKALMFGNPSVIVTTPEGCKRVLTDDEKFTTGWPQSTIELIGKNSFIAMTYEEHKRLRRLTSSSINGMEALSLYLKYIEENVIISLEKWSNMGQIEFLTEIRKLTFKIIMHIFLSSESEPVMEALEKEYTILNHGVRAMQINVPGFAYYKALKARKNLVGIFQSIVDDRRNIRKVYSQKKAKDMMDSLIDVEDDNGRKLNDEDIIDIMLMYLNAGHESSGHITMWATYFLQKHPEYLKKAKEEQEEIIKRRPSTQKGLTLKEIRGMDFLYKVIDETMRVITFSLVVFREAKSDVTINGYTIPKGWKVLTWFRSVHLDPEIYPNPKEFNPNRWNKEHKAGEFLPFGAGTRLCPGNDLAKMEIAVFLHHFTLNYRLEQLNPKCPIRYLPHTRPMDNCLGRVKKC

SEQ ID NO: 261 - protein, 499 aa, Hordeum vulgare subsp. vulgare
  misc_feature (1)..(499): Public GI no. 13022042
  misc_feature (1)..(499)
  Functional Homolog of CDNA ID no. 12660455at SEQ ID no. 252with e-value of 0 and percent identity of 57.26
MGEGAWWAVAAVVAALAVVALDAAVRAAHAWYWTASLGAGRRGRLPPGDMGWPLVGGMWAFLRAFKSGRPDSFIDSFARRFGRAGLYRAFMFSSPTIMATTPEACKQVLMDDDAFVTGWPKATVALIGPKSFVNMGYDEHRRLRKLTAAPINGFDALTSYLGFIDDTVVTTLRGWSERGGDGHFEFLTELRRMTFRIIVQIFMGGADERTAAELERTYTELNYGMRAMAIDLPGFAYHKAIRARRRLVAALQRVLDERRARGGKTAAGAAAPVDMMDRLIAVEDEGGRRLQDDEIIDVLVMYLNAGHESSGHITMWATVFLQENPEILAKAKAEQEAIMRSIPPGQKGLTLRDFRKMAYLSQVVDETLRFVNISFVSFRQATRDVFVNGYLIPKGWKVQLWYRSVHMDPQVYPDPKKFDPSRWEGPPPRAGTFLPFGLGTRLCPGNDLAKLEISVFLHHFLLGYKLTRKNPNCRVRYLPHPRPVDNCLAKITRLSSSHG

SEQ ID NO: 262 - protein, 491 aa, Triticum aestivum
  misc_feature (1)..(491): Ceres CLONE ID no. 703821
  misc_feature (1)..(491)
  Functional Homolog of CDNA ID no. 12660455at SEQ ID no. 252with e-value of 3.4E-33 and percent identity of 39.69
MGELAWAALAGLLVPLAAVALDAAVRAAHAWYWTASLGAGRRGRLPPGDMGWPLVGGMWAFLCAFKSGRPDSFIDSFARRFGRAGLYRAFMFSSPTIMVTTPDACKQVLMDDDTFVTGWPKATVALIGPKSFINMGYDEHRRLRKLTAAPINGFDALTSYLGFIDHTVVTTLRGWSDRGSDFEFLTELRRMTFRIIVQIFMGGADERTAAELESTYTELNYGMRAMAIDLPGFAYHKAIRARRRLVAALQRVLDERRARGAKTAGVDMMDRLIAAEDEGGRRLQDDEIIDVLVMYLNAGHESSGHITMWATVFLQENPDILAKAKAEQEAIMRSIPPGQKGLTLRDFRKMEYLSQVVDETLRFVNISFVSFRQATRDVFVNGYLIPKGWKVQLWYRSVHMDPQVYPDPKKFDPSRWEGPPPRAGTFLPFGLGTRLCPGNDLAKLEISVFLHHFLLGYKLTRKNPNCRVRYLPHPRPVDNCLAKITRVSSSH

SEQ ID NO: 263 - protein, 485 aa, Ginkgo biloba
  misc_feature (1)..(485): Public GI no. 47498770
  misc_feature (1)..(485)
  Functional Homolog of CDNA ID no. 12660455at SEQ ID no. 252with e-value of 0 and percent identity of 54.89
MASIFVPVCVSVAVITITCLKKFNGWRYECGLSSKKPLPPGDMGWPLLGNMLSFLIAFKFNRPNSFVSAFVSRFGRTGLYKPFMFGSPTILATTPETCKQVLMDDAHFVPGWPVSTVQLMGRKSFVALSHEDHDRLRKLTAPSINGHEALSNYLGWIEQRVVSAYEDWANQDRIVLLNELKKVTFDIISYIFLSYESKTGTKLASLEREYTSLNMGIRAMAINLPGTAYHKALKARKNLVAILQSVTEERRSSPDPQAKSNKDVLNALLHVKDENGSLLTDEEIIDLLVMYLNAGHESSAHITMWAIIFLVSHPRLYAEAKAEQEKIVNKRPDGQTHLIMYEIREMNYLRKIIDESLRMVNISLMVFREAMDDVEINGYTIPKGWKTQVWLRSVHMDPQVYPNPTKFDPDRWDKLIPKSGMFIPFGAGSRLCPGSDLAKMEICVFIHHLLFHYKIERLNPDCPVRYLPHPRPTDYCKGRVRKLST

SEQ ID NO: 264 - protein, 519 aa, Zea mays
  misc_feature (1)..(519): Ceres CLONE ID no. 391105
  misc_feature (1)..(519)
  Functional Homolog of CDNA ID no. 12660455at SEQ ID no. 252with e-value of 0 and percent identity of 53.78
MLGVGMAAAVLLGAVALLLADAAARRAHWWYREAAEAVLVGAVALVVVDAAARRAHGWYREAALGAARRARLPPGEMGWPLVGGMWAFLRAFKSGKPDAFIASFVRRFGRTGVYRSFMFSSPTVLVTTAEGCKQVLMDDDAFVTGWPKATVALVGPRSFVAMPYDEHRRIRKLTAAPINGFDALTGYLPFIDRTVTSSLRAWADHGGSVEFLTELRRMTFKIIVQIFLGGADQATTRALERSYTELNYGMRAMAINLPGFAYRGALRARRRLVAVLQGVLDERRAARAKGVSGGGVDMMDRLIEAQDERGRHLDDDEIIDVLVMYLNAGHESSGHITMWATVFLQENPDMFARAKAEQEAIMRSIPSSQRGLTLRDFRKMEYLSQVIDETLRLVNISFVSFRQATRDVFVNGYLIPKGWKVQLWYRSVHMDPQVYPDPTKFDPSRWEGHSPRAGTFLAFGLGARLCPGNDLAKLEISVFLHHFLLGYKLARTNPRCRVRYLPHPRPVDNCLAKITRVGS

SEQ ID NO: 265 - protein, 519 aa, Zea mays; identical to SEQ ID NO: 264
  misc_feature (1)..(519): Public GI no. 5915847
  misc_feature (1)..(519)
  Functional Homolog of CDNA ID no. 12660455at SEQ ID no. 252with e-value of 0 and percent identity of 53.78

SEQ ID NO: 266 - DNA, 1861 bp, Arabidopsis thaliana
  misc_feature (1)..(1861): Ceres CDNA ID no. 12605081
  misc_feature (1)..(1861): Also Known As  Ceres SEEDLINE ME04652
  misc_feature (1)..(1861): Also Known As  Ceres CLONE ID no. 1339493
gagaagaattctacaagtgaattcgatttacacttttttttgtccttttttattaataaatcactgacccgaaaataaaaatagaagcaaaacttcatgtcgtggtttctaatagcggtggcgacaatcgccgccgtcgtatcctacaagctaatccaacggctaagatacaagttcccaccaggcccaagccccaagccgatcgtcggtaacctctacgacataaaaccggtccggttcagatgttactacgagtgggctcaatcttatggaccaatcatatcggtctggatcggttcaattctaaacgtggtcgtatctagcgccgagctagcaaaagaagttctgaaagaacacgaccagaaactcgccgaccggcaccggaacagatcgacggaagcatttagccgcaacggtcaggatcttatatgggccgattatgggcctcattacgtgaaggtgagaaaagtttgcacgcttgagctcttcacaccgaaacgactcgagtctctcagacctatccgtgaagatgaagtcaccgccatggttgaatccgtcttcagagactgtaaccttcctgaaaacagagcaaaaggtttacaactgaggaagtacttaggagcggttgcgttcaacaacataacgcggctagcctttgggaagcgttttatgaacgctgaaggtgttgtggacgagcaagggcttgagttcaaggccatagtatccaacggtctgaagctaggtgcttcactgtcaatagctgaacacatcccgtggctcaggtggatgtttccggctgatgagaaggcgtttgctgagcacggggctcgtcgtgaccgcctcactcgagctatcatggaggagcatactttggcccgtcaaaagtctagtggagcgaaacagcatttcgttgatgcgttgctaacgttgaaggatcagtatgatcttagtgaggatactatcattggtcttctatgggatatgatcacggcagggatggacacgacagcgataacagcggaatgggcgatggcggaaatgatcaagaatccaagagtgcaacaaaaagtgcaagaagagttcgacagagtggttggacttgaccggatcttaaccgaggcagatttctcccgcttaccttacttgcaatgcgtggtgaaagagtcattcaggctgcatcctccaacgcctctaatgctacctcaccgaagcaacgcagatgtcaagatcggaggctatgatattcccaaaggatcaaacgttcatgtgaatgtgtgggctgtggctagagacccggctgtatggaaaaatccatttgagtttagaccagagagattcttggaagaagatgttgacatgaagggtcatgattttaggctgcttccgtttggagctggaagacgggtttgtcccggtgcacaacttggtatcaatttggtaacttcgatgatgagtcatttgcttcaccattttgtttggacacctcctcaagggactaaaccggaggagattgacatgtctgaaaaccctggactcgttacttacatgcgtacccctgtgcaagcggttgcaacgcctcggttgccttcggatctgtacaaacgcgtgccttacgatatgtaaatgtcactctgatctaccttttgttgctgctgctcatgctcttgttgttgtttgtagacatgtttcttgtggtttatcatcgaaaaacttttgatgagatttgttgtatcaattctctcaaggagaagtaaagaagccatcttctttgtcattgggtttacgatctttcaatcagtgcaatgttgtaacttgaaacataagaataaacaggaaacaaacatacaaagatatttgcagg

SEQ ID NO: 267 - protein, 508 aa, Arabidopsis thaliana
  misc_feature (1)..(508): Ceres CDNA ID no. 12605081
  misc_feature (1)..(508): Also Known As  Ceres SEEDLINE ME04652
  misc_feature (1)..(508): Also Known As  Ceres CLONE ID no. 1339493
  misc_feature (28)..(483): Pfam Name: p450 Pfam Description: Cytochrome P450
  misc_feature: Phenotype: Late Flowering Useful for delaying flowering time
  misc_feature: Phenotype: Dark Green Useful for increasing chlorophyll and photosynthetic capacity
  misc_feature: Phenotype: WHOLE PLANT Useful for making bigger plants
  misc_feature: Phenotype: ROSETTE LEAVES Useful for making ornamental plants with modified leaves
  misc_feature: Phenotype: Curled 3 Useful for making plants with altered leaf shape e.g., curled leaves
  misc_feature: Phenotype: Oval Shaped Useful for making plants with increased biomass and foliage
  misc_feature: Phenotype: Serrate Margins Useful for making plants with increased biomass and foliage
  misc_feature: Phenotype: Short Useful for making shorter plants
MSWFLIAVATIAAVVSYKLIQRLRYKFPPGPSPKPIVGNLYDIKPVRFRCYYEWAQSYGPIISVWIGSILNVVVSSAELAKEVLKEHDQKLADRHRNRSTEAFSRNGQDLIWADYGPHYVKVRKVCTLELFTPKRLESLRPIREDEVTAMVESVFRDCNLPENRAKGLQLRKYLGAVAFNNITRLAFGKRFMNAEGVVDEQGLEFKAIVSNGLKLGASLSIAEHIPWLRWMFPADEKAFAEHGARRDRLTRAIMEEHTLARQKSSGAKQHFVDALLTLKDQYDLSEDTIIGLLWDMITAGMDTTAITAEWAMAEMIKNPRVQQKVQEEFDRVVGLDRILTEADFSRLPYLQCVVKESFRLHPPTPLMLPHRSNADVKIGGYDIPKGSNVHVNVWAVARDPAVWKNPFEFRPERFLEEDVDMKGHDFRLLPFGAGRRVCPGAQLGINLVTSMMSHLLHHFVWTPPQGTKPEEIDMSENPGLVTYMRTPVQAVATPRLPSDLYKRVPYDM

SEQ ID NO: 268 - DNA, 1527 bp, Populus balsamifera subsp. trichocarpa
  misc_feature (1)..(1527): Ceres GDNA ANNOT ID no. 1453454
atgaatctccttctgattccgatatccttcatcacccttctcttgacatacaaaatctaccaacgtctacgcttcaagctcccaccagggccaagaccatggccaatagtaggcaacctttatgacgtcaagcctgtgaggttccggtgctttgcagagtgggctcaggcatatggtcctatcatctcagtttggttcggttcaactcttaacgtgattgtttccaatacagaattggcaaaggaagtgctcaaggaaaatgatcaacagttagctgatagacataggagtcgatcagctgccaagtttagcagagacggtaaagaccttatatgggctgattatggacctcactatgttaaggttcgaaaggtttgcacccttgagcttttctctcccaaaagacttgaagctttgaggcctatcagagaagatgaggttgctgccatggttgaatcaattttcaatgactgcactaatcctgaaaacaatggaaaaaccttgacggtgaagaaatatttgggggcagttgcattcaacaacattacaaggctagcatttgggaagcgattcgtgaatgccgaaggcgttatggatgagcaagggctagaattcaaggcaattgtatccaatggacttaagttgggtgcatcacttgcaatggcagagcacattccatggcttcgttggatgtttccgttagaggaagatgcatttgccaagcatggggctcgtcgggaccgactcactagagctattatggatgaacatacccttgcccggcagacgagtggcggtgccaagcagcattttgttgatgcattgcttacattgaaggagaagtatgaccttagtgaagacacaatcattggactgctttgggacatgattactgcgggcatggacacaactgcaatctcagtagaatgggcaatggcagagctaatcaagaacccaagggtgcaacagaaggctcaggaagagttggacagtgttgttggatttgaacgtgtcatgaccgaggctgatttctcaggccttccttacttacaatgtgtagccaaggaggcgctaaggttgcaccccccaacaccacttatgctcccgcaccgtgccaatgccaatgtgaaagttggtggctacgacattcctaagggatcaaatgttcacgtcaatgtatgggccgtagctcgcgatccggccacctggaagaaacccttagagttccggccagagaggttcctggaggaggatgttgacatgaagggtcatgatttcaggctacttccatttggtgcaggaaggagagtgtgccctggtgcacaacttggtatcaatttggtcacatccatgctgggtcacttgctgcaccatttttgttggacccctcctgaaggaatgaagccagaggaaattgacatgtcggaaaatcctgggcttgtcacttacatgacgactccattacaagcagtggccactcctcggttgccttcacatttgtacaaacgtgttgctgttgatatttaa

SEQ ID NO: 269 - protein, 359 aa, Populus balsamifera subsp. trichocarpa
  misc_feature (1)..(359): Ceres GDNA ANNOT ID no. 1453454
  misc_feature (1)..(359)
  Functional Homolog of CDNA ID no. 12605081at SEQ ID no. 267with e-value of 5E-169 and percent identity of 84.96
MVESIFNDCTNPENNGKTLTVKKYLGAVAFNNITRLAFGKRFVNAEGVMDEQGLEFKAIVSNGLKLGASLAMAEHIPWLRWMFPLEEDAFAKHGARRDRLTRAIMDEHTLARQTSGGAKQHFVDALLTLKEKYDLSEDTIIGLLWDMITAGMDTTAISVEWAMAELIKNPRVQQKAQEELDSVVGFERVMTEADFSGLPYLQCVAKEALRLHPPTPLMLPHRANANVKVGGYDIPKGSNVHVNVWAVARDPATWKKPLEFRPERFLEEDVDMKGHDFRLLPFGAGRRVCPGAQLGINLVTSMLGHLLHHFCWTPPEGMKPEEIDMSENPGLVTYMTTPLQAVATPRLPSHLYKRVAVDI

SEQ ID NO: 270 - protein, 509 aa, Glycine max
  misc_feature (1)..(509): Ceres CLONE ID no. 473273
  misc_feature (1)..(509)
  Functional Homolog of CDNA ID no. 12605081at SEQ ID no. 267with e-value of 0 and percent identity of 79.72
MALLLIIPISLVTLWLGYTLYQRLRFKLPPGPRPWPVVGNLYDIKPVRFRCFAEWAQSYGPIISVWFGSTLNVIVSNSELAKEVLKEHDQLLADRHRSRSAAKFSRDGKDLIWADYGPHYVKVRKVCTLELFSPKRLEALRPIREDEVTSMVDSVYNHCTSTENLGKGILLRKHLGVVAFNNITRLAFGKRFVNSEGVMDEQGVEFKAIVENGLKLGASLAMAEHIPWLRWMFPLEEGAFAKHGARRDRLTRAIMAEHTEARKKSGGAKQHFVDALLTLQDKYDLSEDTIIGLLWDMITAGMDTTAISVEWAMAELIRNPRVQQKVQEELDRVIGLERVMTEADFSNLPYLQCVTKEAMRLHPPTPLMLPHRANANVKVGGYDIPKGSNVHVNVWAVARDPAVWKDPLEFRPERFLEEDVDMKGHDFRLLPFGSGRRVCPGAQLGINLAASMLGHLLHHFCWTPPEGMKPEEIDMGENPGLVTYMRTPIQAVVSPRLPSHLYKRVPAEI

SEQ ID NO: 271 - protein, 509 aa, Glycine max; identical to SEQ ID NO: 270
  misc_feature (1)..(509): Public GI no. 2738998
  misc_feature (1)..(509)
  Functional Homolog of CDNA ID no. 12605081at SEQ ID no. 267with e-value of 0 and percent identity of 80.36

SEQ ID NO: 272 - protein, 512 aa, Ocimum basilicum
  misc_feature (1)..(512): Public GI no. 22651519
  misc_feature (1)..(512)
  Functional Homolog of CDNA ID no. 12605081at SEQ ID no. 267with e-value of 0 and percent identity of 78.74
MAALLLLLLLPLLLPAIFLLHHLYYRLRFRLPPGPRPLPIVGNLYDVKPVRFRCFADWAQSYGPIISVWFGSTLNVIVSNTELAKEVLKEKDQQLADRHRSRSAAKFSRDGQDLIWADYGPHYVKVRKVCTLELFSPKRLEALRPIREDEVTAMVESIYHDCTAPDNAGKSLLVKKYLGAVAFNNITRLAFGKRFVNSEGIIDKQGLEFKAIVSNGLKLGASLAMAEHIPSLRWMFPLDEDAFAKHGARRDQLTREIMEEHTRAREESGGAKQHFFDALLTLKDKYDLSEDTIIGLLWDMITAGMDTTAISVEWAMAELIKNPRVQQKAQEELDRVIGYERVMTELDFSNLPYLQCVAKEALRLHPPTPLMLPHRSNSNVKIGGYDIPKGSNVHVNVWAVARDPAVWKNPCEFRPERFLEEDVDMKGHDFRLLPFGAGRRVCPGAQLGINLVTSMIGHLLHHFNWAPPSGVSSDELDMGENPGLVTYMRTPLEAVPTPRLPSDLYKRIAVDL

SEQ ID NO: 273 - DNA, 1530 bp, Populus balsamifera subsp. trichocarpa
  misc_feature (1)..(1530): Ceres GDNA ANNOT ID no. 1528108
atggctctgcctcttttagtattagtttcgatctttgttctccttcttgcatacattctgtaccagaggctgaggttcaagctaccacccggtccacggccgtggccgattgttgggaacctctatgccatcaagcctattaggttcagatgttttgcagagtgggctcaggcttacggaccagttgtttcagtttggtttggttcaactttgaatgttgttgtgtgtaatgcggaactggccaagcaagttctcaaagagaatgaccagcagctggccgatcgacataggtctagattggctgcaaggtttagtagagacggcaaggacctcatctgggctgactatggtcctcattatgtgaaggttaggagagtgtctactcttgagctcttctcagcaaagagacttgaggaactcagacctataagagaagatgaggttactttcatggcagaatccattttcaaggattgcaccaatccagaaaaccatggaaaaagcttgttggtgaagaaatatttgggagatgtggctttcaataacattacaaggctagcatttgggaaacgattcatgaattcagagggcataattgatgagcaaggccaagaattcaaggcaattgtttccaatggagttaggctgggtggatcactgaccatggcagagcacattccatggcttcaatggatgtttccactagaggaagaggctgttgaaaagcataacgctcgtcgagatgggctaactagagttatcatggaggaacacaccaatgcacgcaagaaaagtggaggtgccaagaaacatttcgttgatgcactgcttacattgcaagaaaaatatgaccttagtgaggttacaattactggtctcctatgggacatgattactgctggcatggatacaacagcaatcacagtggagtgggcaatggctgagctaatcaagaacccaagggttcaacagaaggctcaagatgagctagaccgagtggttgggttcgaacgtgtcatgactgaggcagatttcccaaatctcccttacctgcaagctgtagtcaaggaatcgctgaggttgcacccaccaacaccactgatgctacctcatcgtgccaatactactgttaaaatcggcggctatgacatccctaagggatcagttgttcacgtaaacgtatgggctgtggctcgtgatccggctttgtggaagaaccctttagagttccggccggagaggttctttgaggaggatgtcgacatgagaggtcatgatttcaggctacttccattcggagctggaagaagggtgtgtcctggtgcacagcttggtatcaatctggtcacgtctataatcggtcatctgcttcaccattttcattggaccacccctgatggtgtcaagccagaggaaattgacatgtcagaaagacctggacttgtcacttatatgatgaccccattacaagcagtggccactcctcgcctgccttcacacttgtacaaacggatggcttcagatatgtga

SEQ ID NO: 274 - protein, 359 aa, Populus balsamifera subsp. trichocarpa
  misc_feature (1)..(359): Ceres GDNA ANNOT ID no. 1528108
  misc_feature (1)..(359)
  Functional Homolog of CDNA ID no. 12605081at SEQ ID no. 267with e-value of 2.3E-157 and percent identity of 79.11
MAESIFKDCTNPENHGKSLLVKKYLGDVAFNNITRLAFGKRFMNSEGIIDEQGQEFKAIVSNGVRLGGSLTMAEHIPWLQWMFPLEEEAVEKHNARRDGLTRVIMEEHTNARKKSGGAKKHFVDALLTLQEKYDLSEVTITGLLWDMITAGMDTTAITVEWAMAELIKNPRVQQKAQDELDRVVGFERVMTEADFPNLPYLQAVVKESLRLHPPTPLMLPHRANTTVKIGGYDIPKGSVVHVNVWAVARDPALWKNPLEFRPERFFEEDVDMRGHDFRLLPFGAGRRVCPGAQLGINLVTSIIGHLLHHFHWTTPDGVKPEEIDMSERPGLVTYMMTPLQAVATPRLPSHLYKRMASDM

SEQ ID NO: 275 - DNA, 1572 bp, Populus balsamifera subsp. trichocarpa
  misc_feature (1)..(1572): Ceres GDNA ANNOT ID no. 1474685
  misc_feature (1)..(1572)
  Functional Homolog of CDNA ID no. 12605081at SEQ ID no. 267with e-value of 1.2E-153 and percent identity of 79.11
atggctctgcctcttttagtattagtttcgatctttgttctccttcttgcatacattctgtaccagaggctgaggttcaagctaccacccggtccacggccgtggccgattgttgggaacctctatgccatcaagcctattaggttcagatgttttgcagagtgggctcaggcttacggaccagttgtttcagtttggtttggttcaactttgaatgttgttgtgtgtaatgcggaactggccaagcaagttctcaaagagaatgaccagcagctggccgatcgacataggtctagattggctgcaaggtttagtagagacggcaaggacctcatctgggctgactatggtcctcattatgtgaaggttaggagagtgtctactcttgagctcttctcagcaaagagacttgaggaactcagacctataagagaagatgaggttactttcatggcagaatccattttcaaggattgcaccaatccaggtttagctcagttgtgtctgattcagaattggctaaagaatgaaaaccatggaaaaagcttgttggtgaagaaatatttgggagatgtggctttcaataacattacaaggctagcatttgggaaacgattcatgaattcagagggcataattgatgagcaaggccaagaattcaaggcaattgtttccaatggagttaggctgggtggatcactgaccatggcagagcacattccatggcttcaatggatgtttccactagaggaagaggctgttgaaaagcataacgctcgtcgagatgggctaactagagttatcatggaggaacacaccaatgcacgcaagaaaagtggaggtgccaagaaacatttcgttgatgcactgcttacattgcaagaaaaatatgaccttagtgaggttacaattactggtctcctatgggacatgattactgctggcatggatacaacagcaatcacagtggagtgggcaatggctgagctaatcaagaacccaagggttcaacagaaggctcaagatgagctagaccgagtggttgggttcgaacgtgtcatgactgaggcagatttcccaaatctcccttacctgcaagctgtagtcaaggaatcgctgaggttgcacccaccaacaccactgatgctacctcatcgtgccaatactactgttaaaatcggcggctatgacatccctaagggatcagttgttcacgtaaacgtatgggctgtggctcgtgatccggctttgtggaagaaccctttagagttccggccggagaggttctttgaggaggatgtcgacatgagaggtcatgatttcaggctacttccattcggagctggaagaagggtgtgtcctggtgcacagcttggtatcaatctggtcacgtctataatcggtcatctgcttcaccattttcattggaccacccctgatggtgtcaagccagaggaaattgacatgtcagaaagacctggacttgtcacttatatgatgaccccattacaagcagtggccactcctcgcctgccttcacacttgtacaaacggatggcttcagatatgtga

SEQ ID NO: 276 - protein, 373 aa, Populus balsamifera subsp. trichocarpa
  misc_feature (1)..(373): Ceres GDNA ANNOT ID no. 1474685
MAESIFKDCTNPGLAQLCLIQNWLKNENHGKSLLVKKYLGDVAFNNITRLAFGKRFMNSEGIIDEQGQEFKAIVSNGVRLGGSLTMAEHIPWLQWMFPLEEEAVEKHNARRDGLTRVIMEEHTNARKKSGGAKKHFVDALLTLQEKYDLSEVTITGLLWDMITAGMDTTAITVEWAMAELIKNPRVQQKAQDELDRVVGFERVMTEADFPNLPYLQAVVKESLRLHPPTPLMLPHRANTTVKIGGYDIPKGSVVHVNVWAVARDPALWKNPLEFRPERFFEEDVDMRGHDFRLLPFGAGRRVCPGAQLGINLVTSIIGHLLHHFHWTTPDGVKPEEIDMSERPGLVTYMMTPLQAVATPRLPSHLYKRMASDM

SEQ ID NO: 277 - protein, 509 aa, Ocimum basilicum
  misc_feature (1)..(509): Public GI no. 22651521
  misc_feature (1)..(509)
  Functional Homolog of CDNA ID no. 12605081at SEQ ID no. 267with e-value of 0 and percent identity of 78.54
MAALLLLLLLLPAIFLLHHLYYRLRFRLPPGPRPLPVVGNLYDVKPVRFRCFADWAQSYGPIISVWFGSTLNVIVSNTELAKEVLKEKDQQLADRHRSRSAAKFSRDGQDLIWADYGPHYVKVRKVCMLELFSPKRLEALRPIREDEVTAMVESIYHDCTAPDNAGKSLLVKKYLGAVAFNNITRLAFGKRFVNSEGIIDKQGLEFKAIVSNGLKLGASLAMAEHIPWLRWMFPLDEDAFAKHGARRDQLTREIMEEHTRAREESGGAKQHFFDALLTLKDKYDLSEDTIIGLLWDMITAGMDTTAISVEWAMAELIKNPRVQQKAQEELDRVIGYERVMTELDFSNLPYLQCVAKEALRLHPPTPLMLPHRSNSNVKIGGYDIPKGSNVHVNVWAVARDPAVWKNPSEFRPERFLEEDVDMKGHDFRLLPFGAGRRVCPGAQLGINLVTSMIGHLLHHFNWAPPSGVSTDELDMGENPGLVTYMRTPLEAVPTPRLPSDLYKRIAVDL

SEQ ID NO: 278 - protein, 509 aa, Ammi majus
  misc_feature (1)..(509): Public GI no. 46947675
  misc_feature (1)..(509)
  Functional Homolog of CDNA ID no. 12605081at SEQ ID no. 267with e-value of 0 and percent identity of 75.59
MALFLYLIIPCTIILLHQLYHKLRFKLPPGPRPWPIVGNLYDIEPVRFRCFNNWSKTYGPIISVWFGSTLNVIVNNTELAKEVLKDKDQQLADRHRSRSAAKFSRDGQDLIWADYGPHYVKVRKVCTLELFTPKRLEAIRPVREDEVTAMVESIYKDCTNSDTIGKSLLVRQYLGGVAFNNITRLAFGKRFVNSEGVMDEQGKEFKSIIANGLKLGASLATAEHIQWLRWLFPLEEEAFAKHGARRDNLTRAIMEEHTLARQKSGGTKQHFVDALLTLQSKYDLSEDTIIGLLWDMITAGADTTAIVVEWGMAELIKNPRVQEKAQEELDRVIGYERVLTELDFSNLPYLQCVAKEALRLHPPTPLMLPHRANANVKIGGYDIPKGSNVHVNVWAVARDPAVWKNPLEFRPERFLEEDVDMKGHDYRLLPFGAGRRVCPGAQLGINLVTSMLGHLLHHYSWAPPSGLSSDEIDMSESPGMVTYMKTPLQAVPTPRLPSQLYKRLAVEDM

SEQ ID NO: 279 - DNA, 1788 bp, Arabidopsis thaliana
  misc_feature (1)..(1788): Ceres CDNA ID no. 12654761
  misc_feature (1)..(1788): Also Known As  Ceres SEEDLINE ME04665
agtgctcgactatacatatagccaaagaagagcagaaaaatcaaagtcgtgagttcagaagctataacaaaatttctaagaaaaagaaagataagaaaatggagaattttatggtagagatggccaagaccatttcgtggatagttgtaataggagtgttaggtttagggattcgtgtttacggtaaagtgatggcggagcaatggaggatgcggaggaagctgacgatgcagggcgtgaagggtcctccgccgtcgctatttcgtggaaacgtgccggagatgcaaaaaatccagtcacaaataatgagtaactctaaacactactccggtgataatatcatcgcccatgactacacttcttctctctttccatatctcgaccactggcgaaaacaatacgggagagtgtacacgtattcgacgggggtgaagcaacacttgtacatgaaccacccggagttggtgaaagaacttaaccaagccaacactcttaaccttggcaaagtctcttacgtcaccaaacgccttaaatccattcttggccgtggtgttatcacctctaatgggcctcattgggcccatcaacgtcgtatcattgcacctgagtttttcctcgacaaagtcaagggaatggtgggattggtggtggaatcagcgatgccaatgctgagtaaatgggaagagatgatgaaaagagaaggagaaatggtgtgtgacataattgtagacgaagacctaagagctgcctctgctgacgttatctctagagcttgctttgggagctctttctccaaaggcaaagagatcttctctaagcttagatgtcttcaaaaggccatcactcacaacaacatcctcttcagcctcaatggcttcactgatgttgtgttcgggactaagaagcatgggaacgggaagattgatgagctagagagacacattgagtctttgatatgggaaaccgttaaagaaagagaaagggaatgtgtgggagatcacaagaaggatctaatgcagttgatactagaaggggccaggagtagttgtgatggcaacttggaggacaagacacaatcttacaaaagtttcgtggtggacaattgcaagagcatctattttgccgggcatgagaccagtgcggttgctgtctcttggtgtcttatgctcctcgctctcaacccttcttggcaaactcgtatccgcgatgaagtctttcttcattgcaagaacggtatacctgacgcagactctatttccaacctcaaaacggtgacaatggttatccaggaaacgttgaggctatacccaccagcagcattcgtgtcgagagaagcccttgaggacacaaaactcggaaacctcgtggtgccaaagggagtgtgcatctggacgttgatccctacattgcacagagaccctgagatatggggagctgacgcaaatgaattcaatccagaaagatttagcgaaggagtctctaaagcctgcaaacaccctcagtcattcgtcccatttggcttagggacaaggttgtgtttaggaaagaattttggtatgatggagctcaaggttcttgtctcacttattgtgtcaaggtttagctttactctctctcccacatatcaacactctccggtgtttagaatgcttgtagagcctcaacatggtgttgtcattagagttctgagacaataagatatgtcgttagcttatggttttagttttaatcctgtgtaataataagatattattacactatagtactataatagtattttctttggta

SEQ ID NO: 280 - protein, 532 aa, Arabidopsis thaliana
  misc_feature (1)..(532): Ceres CDNA ID no. 12654761
  misc_feature (1)..(532): Also Known As  Ceres SEEDLINE ME04665
  misc_feature (98)..(241): Pfam Name: p450 Pfam Description: Cytochrome P450
  misc_feature: Phenotype: Late Flowering Useful for delaying flowering time
  misc_feature: Phenotype: Dark Green Useful for increasing chlorophyll and photosynthetic capacity
  misc_feature: Phenotype: Oval Shaped Useful for making plants with increased biomass and foliage
  misc_feature: Phenotype: Serrate Margins Useful for making plants with increased biomass and foliage
MENFMVEMAKTISWIVVIGVLGLGIRVYGKVMAEQWRMRRKLTMQGVKGPPPSLFRGNVPEMQKIQSQIMSNSKHYSGDNIIAHDYTSSLFPYLDHWRKQYGRVYTYSTGVKQHLYMNHPELVKELNQANTLNLGKVSYVTKRLKSILGRGVITSNGPHWAHQRRIIAPEFFLDKVKGMVGLVVESAMPMLSKWEEMMKREGEMVCDIIVDEDLRAASADVISRACFGSSFSKGKEIFSKLRCLQKAITHNNILFSLNGFTDVVFGTKKHGNGKIDELERHIESLIWETVKERERECVGDHKKDLMQLILEGARSSCDGNLEDKTQSYKSFVVDNCKSIYFAGHETSAVAVSWCLMLLALNPSWQTRIRDEVFLHCKNGIPDADSISNLKTVTMVIQETLRLYPPAAFVSREALEDTKLGNLVVPKGVCIWTLIPTLHRDPEIWGADANEFNPERFSEGVSKACKHPQSFVPFGLGTRLCLGKNFGMMELKVLVSLIVSRFSFTLSPTYQHSPVFRMLVEPQHGVVIRVLRQ

SEQ ID NO: 281 - DNA, 1548 bp, Populus balsamifera subsp. trichocarpa
  misc_feature (1)..(1548): Ceres GDNA ANNOT ID no. 1457794
atggagctgctgctgctgctgcccaaggtcacagttgccgttgctcttatcggccttgtcagcattgtcatacggatgtgtgatgctctaatattcaagccagaaaagcttcgttcgaagctacgaaagcaaggtatccgaggtccaccgcctgcatttttgcttggaaacatacgggacattaagaaggcacgatctaaggtctcaaaagcatcacgggaaggagaacaagtgataagtcataattcttccaacactcccttctcattcttcgagcaatggagcaagaaatatggttcaacattcatgttctcgcttgggaacatacagatattgcatatgaaccatcctgatgcggtgaaggaaatcagcatctgcacttccttagacttggggaagccttcttaccaagtaaaagagcgcggtcctctgcttggccaaggtattctgacctcaaatggtgctatatgggcacatcagagaaagatccttgctcctgaattttacatggagaatgtcaagaatttcatgagcatcatggtcgaatcctcgaatatagtagttgattcgtggactaaaaggattgaaagtgagggaggagttgtggacatcaacgttgatgaagacatgagaagcttctctggagatgtgatttcaaaagcatgttttgggagtaattatgccaaaggagaagagatattcctcaagcttagagctcttcaaggagccatgtcaaagaaagctttgtcttctgggattcccattttgagggctctaccaactaagagcaacagagaagtttggagattagagaaagaagtgcgtgctttaattttgaaggaagtgaaggaagaaaaggaacaaacatcgaaggacctgttagaaataatcctgaaaggagccaaggatagtgagaccagcaaagctgaaatggaccgtttcgttgttgacaattgcaagaacatatacttggctggctatgaaacaacttccgtcactgcaacatggacaatgatgcttttgggatcaaatcctgaatggcaagatagagttcgagccgaggtgcttgaggtctgtggggggcaaatgcctgatgctggcatggttcgcaggatgaaaacattgacgatggtgattcatgaatctctgcgcctctaccctccagtttgtgtgatatccagggaggcgttacaggacatgaaatttggagacatttttgtgcccaagggtgtcaacgtttggaccttgattgtaaccctacaccaagaccctgaaatatggggatctgacgctgacaagttcaatcctgagaggtttgccaatggggtcagtggcgcctgcaagcatcctcatgtttacatgccctttggtgttgggccacggacatgtctcggacagcattttgccatggcagaactcaaaatcctcatcgcaactatcgtttccaatttctccttcactatatcacccaaatacattcacgccccagctcttaggttggttatagaacctgaacatggagtgaatcttctcattaaaaagctgtga

SEQ ID NO: 282 - protein, 490 aa, Populus balsamifera subsp. trichocarpa
  misc_feature (1)..(490): Ceres GDNA ANNOT ID no. 1457794
  misc_feature (1)..(490)
  Functional Homolog of CDNA ID no. 12654761at SEQ ID no. 280with e-value of 1.3E-124 and percent identity of 48.84
MCDALIFKPEKLRSKLRKQGIRGPPPAFLLGNIRDIKKARSKVSKASREGEQVISHNSSNTPFSFFEQWSKKYGSTFMFSLGNIQILHMNHPDAVKEISICTSLDLGKPSYQVKERGPLLGQGILTSNGAIWAHQRKILAPEFYMENVKNFMSIMVESSNIVVDSWTKRIESEGGVVDINVDEDMRSFSGDVISKACFGSNYAKGEEIFLKLRALQGAMSKKALSSGIPILRALPTKSNREVWRLEKEVRALILKEVKEEKEQTSKDLLEIILKGAKDSETSKAEMDRFVVDNCKNIYLAGYETTSVTATWTMMLLGSNPEWQDRVRAEVLEVCGGQMPDAGMVRRMKTLTMVIHESLRLYPPVCVISREALQDMKFGDIFVPKGVNVWTLIVTLHQDPEIWGSDADKFNPERFANGVSGACKHPHVYMPFGVGPRTCLGQHFAMAELKILIATIVSNFSFTISPKYIHAPALRLVIEPEHGVNLLIKKL

SEQ ID NO: 283 - protein, 527 aa, Zea mays
  misc_feature (1)..(527): Ceres CLONE ID no. 1548098
  misc_feature (1)..(527)
  Functional Homolog of CDNA ID no. 12654761at SEQ ID no. 280with e-value of 4.2E-117 and percent identity of 47.72
MEVAMAMAVKVLLSLCCVGACGLAVYLYHILWLVPQKVLAKFEDQKIGGPRPSFPYGNLADMREAAAAAKAARASARRSGSGGGGIVHDYRPAVLPYYEKWRKEYGPIFTYSMGNVVFLHVSRPDVVRDINLCVSLDLGKSSYLKATHEPLFGGGILKSNGEAWLHQRKIIAPEFFLDKVKGMVDLMVDSAQPLLMSWEERVDRNGGITDIKIDDDIRAYSADVISRTCFGSSYIKGKEIFMKIRELQQAVSKPNVLAEMTGLRFFPSMRNKQAWELHKQVRKLILEIVKESGEDRNLLSAILHSASTSRVGIAEAENFIVDNCKSIYFAGHESTAVTAAWCLMLLGLHPEWQNRVREEVHEVCRGQPVDSRSLQKMKNLTMVIQETLRLYPAGAFVSRQALQELKLGGVHIPKGVNIYIPVSTMHLDPELWGPDVKEFNPERFSDVRPQLHSYLPFGAGARTCLGQGFAMAELKILISLIVSKFVLKLSPHYQHSPTLKLIVEPELGVDLTLTKVQSVCTKRGTAI

SEQ ID NO: 284 - protein, 522 aa, Oryza sativa subsp. japonica
  misc_feature (1)..(522): Public GI no. 77552864
  misc_feature (1)..(522)
  Functional Homolog of CDNA ID no. 12654761at SEQ ID no. 280with e-value of 1.3E-120 and percent identity of 46.71
MELFSSQQWLALLPPIILCILLFSYVYIILWLRPERLRQKLRSQGVRGPKPSFLFGNIPEMRRIQQLAKSAHEQEAGSTDMFSSNYVATLFPYFLHWSRVYGSIYLYSTGSIQVLNVTDPNMVKELANCKSLDLGKPCYLQKERGALLGMGILTSNGDLWVHQRKVIAPELFMERVKGMVNLMMEAAMSMLNSWKNEVEDRGGSAEIVVDEFLRTFSADVISRACFGSSFSEGKEIFIKIRQLQKAMAKQSMLIGVPGSRYLPTRSNRGIWNLDSSIRTLILNISKKYEHDSSTSVNKDLLHSIIQGSKDGPFASCTPEDFIVDNCKNIYFAGHETTSTTAAWCLMLLASHHEWQSRARVESLDICQGRPLDFDILRKLKKLTMVIQETLRLYPPASFVAREALNDMKLGGIDIPKGTNIWIPIAMAHRDPSVWGPSADKFDPDRFANGIAGACKPPHMYMPFGVGVRTCAGQNLAMVELKVVLSLLLSKFEFKLSPNYVHCPAFRLTIEPGKGVPLIFREL

SEQ ID NO: 285 - protein, 526 aa, Oryza sativa subsp. japonica
  misc_feature (1)..(526): Public GI no. 50940049
  misc_feature (1)..(526)
  Functional Homolog of CDNA ID no. 12654761at SEQ ID no. 280with e-value of 3.2E-108 and percent identity of 45.36
MAAASLCCGVAAYLYYVLWLAPERLRAHLRRQGIGGPTPSFPYGNLADMRSHAAAAAGGKATGEGRQEGDIVHDYRQAVFPFYENWRKQYGPVFTYSVGNMVFLHVSRPDIVRELSLCVSLDLGKSSYMKATHQPLFGEGILKSNGNAWAHQRKLIAPEFFPDKVKGMVDLMVDSAQVLVSSWEDRIDRSGGNALDLMIDDDIRAYSADVISRTCFGSSYVKGKQIFDMIRELQKTVSTKKQNLLAEMTGLSFLFPKASGRAAWRLNGRVRALILDLVGENGEEDGGNLLSAMLRSARGGGGGGGEVAAAAEDFVVDNCKNIYFAGYESTAVTAAWCLMLLALHPEWQDRVRDEVQAACCGGGGRSPDFPALQKMKNLTMVIQETLRLYPAGAVVSRQALRELSLGGVRVPRGVNIYVPVSTLHLDAELWGGGAGAAEFDPARFADARPPLHAYLPFGAGARTCLGQTFAMAELKVLLSLVLCRFEVALSPEYVHSPAHKLIVEAEHGVRLVLKKVRSKCDWAGFD

SEQ ID NO: 286 - protein, 520 aa, Lolium rigidum
  misc_feature (1)..(520): Public GI no. 13661758
  misc_feature (1)..(520)
  Functional Homolog of CDNA ID no. 12654761at SEQ ID no. 280with e-value of 6.2E-105 and percent identity of 42.05
MEKLHLAVLVLPVLLGLALLYICDIVWLRPERIRRRWRKQGVRGPRPTLLYGNTQEMKKIRQDLAPAQKQDTNNYVYTLFPHLLVWTKTYGSVFLYSIGAVDILYISDPAMVKDMSHCTSSQLGKPIYLQKSRKPLFGEGILISNGDIWAFERKIIAPELFMEKIKVMIGLIVEASVPLLEAWESMLDNSGGIREIDVDGYMRNFSADVIARACFGSDFATGEEIFSKLRQLQKAISQQDSLVGLSALWKYLPTKSNKEMRELEQEVRLLILDVARREGSSSSNSNIYMHTTHNDLLRSIVDGAQQCPSYPGTAEDFIVDNCKNMYFGGHETTAITATWCLMLLATHPEWQDRARAEALDVCCGDTAIDFDVLRRLKTITMVIQETVRLFPPASLMVREALTDVKLGGLNVPQGTIIQAGIAVVHLDRDIWGQDAGEFRPDRFMNGAAAACKPAHMYMPFGHGPRSCPGQHLAVVELKVLLVRLLSKYSFSPSPGYRHAPLFRLTIEPGFGMPLVVTRLP

SEQ ID NO: 287 - protein, 521 aa, Lolium rigidum
  misc_feature (1)..(521): Public GI no. 13661756
  misc_feature (1)..(521)
  Functional Homolog of CDNA ID no. 12654761at SEQ ID no. 280with e-value of 3.7E-107 and percent identity of 42.58
MEELHLLVLVLSFLLGLALLYICEILWLRPERARKRWRKQGVRGPRPTLLSGNTQEMKRIRQDLPPAQKQDINSYTHTIFPHLLLWRETYGSVFLYSTGAVDILYVSDPGMVKDVIHCTSSELGRPIYLQKSRKPLFGDGILMSSGDIWAYERKVIAPELFMEKIKVMVGLIVEASVPLLEAWESMLDNSGGVTEIDVDGYMRNFSADVIARACFGSDFATGEEIFSKLRQLQKAISQQDTLVGLSALWKYLPTKSNKEMRELQREVRLLILDIASRGNSSNSNNSSGCTHTTHNDLMRSIVDGAHQCPSYSGTAEDFIVDNCKNIYFAGHETTAITATWCLMLLATHPDWQDRARAEALEACSGGTAIDFNTLRQLKTITMVIQETMRLYPPASSTMREALMDIKLGGLDVPQGTIIQTPIAVLHLDRDVWGQDAGEFRPDRFANGAAAACKPGHMYLPFGHGPRICPGQHLAMVELKVVLVHLLSKFAFSPSPGYRHAPLFRLTIEPGFGMPLVVTKLS

SEQ ID NO: 288 - DNA, 1464 bp, Populus balsamifera subsp. trichocarpa
  misc_feature (1)..(1464): Ceres GDNA ANNOT ID no. 1463878
atggaagggttccccatctcctacaatttcacttgtcttgttttgcttctgacatggagcttgatcgtttatctctactactctttctggtggaggcccgagctaaggcttagaaagcaaggaatcagaggtcccccgcctaattttctactgggaaacattccagaaattaagcaagctacagttcagaatagaagtgaaagtactccaagcatggaaagcgacagtttttcaggtttcccaagtttcaagcagtggtgcaagaaatatggtaacacgtacatgtttaaacttggggcgttgcacttcttgtatgccactaatccgttcatggtgaaggaaataaaactctttagatcgttggacctgggaaaacctgcttatctacagaaggacaggggagttctgttaggcaaaggcgttattacatcaaatggaccggcttggtctcaccagagaaagattttaagcccccagctctatgtggacaaggatactttgaacataattgttgaatctggtatcactgtgattaaatcatgggaaagaatattaatggaatccaaggatggattagatgcagatatcatggtggatagccacatgagaagcttcacctcctgcataatctcaaagcttatgttcgggcatgatcattgtagaggaatgaacgtaactgcaagatatcttcctactaaagcaaatagaaatgcttggagattggcaaaggagatccattcgatgattttggacatagccaagaaccgctgtggatctagcacaactaaggacatattgcaagtgatcttggaaggttccgaaaatggtgggcctggtccatcaagtgctcatgagttcatagttgataactgcaaggatatgttgctcgctgcctctgaggggactgctatttctgcaatgtggggtttaatgctattagcttcaaatcctgaatggcaagctcgtgcccggtccgaagttaagcaagtctgtggtggtcatctcccgaatttcaatatgcttggcaagatgaaagtgttaaagatggtgatattagaggtgctcaggctttacccgccagtggcgttggtatcaaggcgagccctgcaagatgtgaagctttgtaatatgcaggttccaaaaggtgtaaacatttggatatgggcaccagcattgcaccgcgaccctgacctttgggggcctgacgcggacaagttcaatcctgaaaggttcattgacggagtttcaggtgcatgcaagtcttcacatgcctatatacctttcggagttggggctcggctgtgtcccggcaataaattagggatgatacaattgaaagtcttgcttgctatgatcttatccagtttcaatcttagcatctccccaaactatcgtcactcccctaccttgggtttgcttttggagcccgagcacggtgttaatcttgtcattcagaagatatga

SEQ ID NO: 289 - protein, 416 aa, Populus balsamifera subsp. trichocarpa
  misc_feature (1)..(416): Ceres GDNA ANNOT ID no. 1463878
  misc_feature (1)..(416)
  Functional Homolog of CDNA ID no. 12654761at SEQ ID no. 280with e-value of 9.8E-86 and percent identity of 44.25
MESDSFSGFPSFKQWCKKYGNTYMFKLGALHFLYATNPFMVKEIKLFRSLDLGKPAYLQKDRGVLLGKGVITSNGPAWSHQRKILSPQLYVDKDTLNIIVESGITVIKSWERILMESKDGLDADIMVDSHMRSFTSCIISKLMFGHDHCRGMNVTARYLPTKANRNAWRLAKEIHSMILDIAKNRCGSSTTKDILQVILEGSENGGPGPSSAHEFIVDNCKDMLLAASEGTAISAMWGLMLLASNPEWQARARSEVKQVCGGHLPNFNMLGKMKVLKMVILEVLRLYPPVALVSRRALQDVKLCNMQVPKGVNIWIWAPALHRDPDLWGPDADKFNPERFIDGVSGACKSSHAYIPFGVGARLCPGNKLGMIQLKVLLAMILSSFNLSISPNYRHSPTLGLLLEPEHGVNLVIQKI

SEQ ID NO: 290 - protein, 519 aa, Triticum aestivum
  misc_feature (1)..(519): Ceres CLONE ID no. 818090
  misc_feature (1)..(519)
  Functional Homolog of CDNA ID no. 12654761at SEQ ID no. 280with e-value of 2.3E-11 and percent identity of 34.65
MGVATAVGVAASLCCVGACALALYLYRILWLAPERVRRALRRQGVRGPPPSFPYGNLADMRQAAAAAKRTRGAGDVVHDYRSAVFPFYEKWRNEYGPVFTYSVGNMVFLHASDPAVVRDVCLSVSPDELGKSTYMKVTHHPLFGDGILKSNGDAWARQRKLIAPEFFPDKIKGMVDLMVDSAQALVRSWEARVAESDGGALELTVDDDFRTYSGDVISRTCFGSSYVKGKRIFAMIRELQKTVSSPNLLAEMTGLRFLPTRSNREAWRLNRRVRRLILDVVRESGEADGGSNLLNAMLRSGQAEAGVGVAAAEDFVVDNCKSIYFAGYETTAVTAAWCMMLLALHPEWQRRVRDEATEALAGGAAALDLSSLQRMKQLTMVIQETLRLYPAGSVVSRQALRELALGGVRVPGGVNIYVPVSTVHLDAELWGSDAREFHPERFAARPQLHSYLPFGAGARTCLGQGFAMAELKVLLSLLLVGFEVALSPDYLHSPVLRLTVEPEHGMRLVLRNVRPNGEP

SEQ ID NO: 291 - protein, 577 aa, Oryza sativa subsp. japonica
  misc_feature (1)..(577): Public GI no. 57863822
  misc_feature (1)..(577)
  Functional Homolog of CDNA ID no. 12654761at SEQ ID no. 280with e-value of 2.7E-106 and percent identity of 42.67
MESFFVFFTAAALPVVVAAAVIAGLCITAAWLARPRRVAEVFRRQGIDGPPPSSFLAGNLPEMKARVAAAASAAAPTADGEETASAGGGGGGRDFEKDGFDDYCTRIFPYFHKWRKAYGETYLYWLRRRPALYVTDPELIGEIGRCVSLDMGKPKYLQKGQEPLFGGGVLKANGACWARQRKVIAPEFYMARVRAMVQLMVDAAQPLIASWESRIDAAGGAAAAEVVVDGDLRSFSFDVISRACFGSDYSRGREIFLRLRELSGLMSETSVIFSIPSLRHLPTGKNRRIWRLTGEIRSLIMELVRERRCAARAAREHGGKAAPPSPPERDFLGSIIENSGGQPRPDDFVVDNCKNIYFAGHETSAVTATWCLMLLAAHPEWQDRARAEVLEVCGGDGAAAPAAPDFDMVSRMRTVGMVVQETLRLFPPSSFVVRETFRDMQLGRLLAPKGTYLFVPVSTMHHDVAAWGPTARLFDPSRFRDGVAAACKHPQASFMPFGLGARTCLGQNLALVEVKTLVAVVLARFEFTLSPEYRHSPAFRLIIEPEFGLRLRIRRAGGQDATSQVDTSTAPVHSSHN

SEQ ID NO: 292 - DNA, 1691 bp, Arabidopsis thaliana
  misc_feature (1)..(1691): Ceres CDNA ID no. 12724226
  misc_feature (1)..(1691): Also Known As  Ceres SEEDLINE ME04669
gagtgagagagagagagaaactagctccatgttcgaaacagagcatcatactctcttacctcttcttcttctcccatcgcttttgtctcttcttctcttcttgattctcttgaagagaagaaatagaaaaaccagattcaatctacctccgggtaaatccggttggccatttcttggtgaaaccatcggttatcttaaaccgtacaccgccacaacactcggtgacttcatgcaacaacatgtctccaagtatggtaagatatatagatcgaacttgtttggagaaccaacgatcgtatcagctgatgctggacttaatagattcatattacaaaacgaaggaaggctctttgaatgtagttatcctagaagtataggtgggattcttgggaaatggtcgatgcttgttcttgttggtgacatgcatagagatatgagaagtatctcgcttaacttcttaagtcacgcacgtcttagaactattctacttaaagatgttgagagacatactttgtttgttcttgattcttggcaacaaaactctattttctctgctcaagacgaggccaaaaagtttacgtttaatctaatggcgaagcatataatgagtatggatcctggagaagaagaaacagagcaattaaagaaagagtatgtaactttcatgaaaggagttgtctctgctcctctaaatctaccaggaactgcttatcataaagctcttcagtcacgagcaacgatattgaagttcattgagaggaaaatggaagagagaaaattggatatcaaggaagaagatcaagaagaagaagaagtgaaaacagaggatgaagcagagatgagtaagagtgatcatgttaggaaacaaagaacagacgatgatcttttgggatgggttttgaaacattcgaatttatcgacggagcaaattctcgatctcattcttagtttgttatttgccggacatgagacttcttctgtagccattgctctcgctatcttcttcttgcaagcttgccctaaagccgttgaagagcttagggaagagcatcttgagatcgcgagggccaagaaggaactaggagagtcagaattaaattgggatgattacaagaaaatggactttactcaatgtgttataaatgaaactcttcgattgggaaatgtagttaggtttttgcatcgcaaagcactcaaagatgttcggtacaaaggatacgatatccctagtgggtggaaagtgttaccggtgatctcagccgtacatttggataattctcgttatgaccaacctaatctctttaatccttggagatggcaacagcaaaacaacggagcgtcatcctcaggaagtggtagtttttcgacgtggggaaacaactacatgccgtttggaggagggccaaggctatgtgctggttcagagctagccaagttagaaatggcagtgtttattcatcatctagttcttaaattcaattgggaattagcagaagatgataaaccatttgcttttccttttgttgattttcctaacggtttgcctattagggtttctcgtattctgtaaaaaaaaaaaaagatgaaagtatttttattctcttcttttttttttgataattttaaatcattttttttgcccaatgatatataaaaatttggataaataatattattggatattcgttttt

SEQ ID NO: 293 - protein, 513 aa, Arabidopsis thaliana
  misc_feature (1)..(513): Ceres CDNA ID no. 12724226
  misc_feature (1)..(513): Also Known As  Ceres SEEDLINE ME04669
  misc_feature (40)..(90): Pfam Name: p450 Pfam Description: Cytochrome P450
  misc_feature: Phenotype: Late Flowering Useful for delaying flowering time
  misc_feature: Phenotype: Dark Green Useful for increasing chlorophyll and photosynthetic capacity
  misc_feature: Phenotype: Large Useful for making larger plants
  misc_feature: Phenotype: Yellow-Green Viable 1 Useful for making lethal plants for genetic confinement systems
  misc_feature: Phenotype: ROSETTE LEAVES Useful for making ornamental plants with modified leaves
  misc_feature: Phenotype: Long Petioles Useful for making plants that grow better in shade
  misc_feature: Phenotype: Short Petioles Useful for making smaller plants
  misc_feature: Phenotype: Weak Useful for making stronger plants
MFETEHHTLLPLLLLPSLLSLLLFLILLKRRNRKTRFNLPPGKSGWPFLGETIGYLKPYTATTLGDFMQQHVSKYGKIYRSNLFGEPTIVSADAGLNRFILQNEGRLFECSYPRSIGGILGKWSMLVLVGDMHRDMRSISLNFLSHARLRTILLKDVERHTLFVLDSWQQNSIFSAQDEAKKFTFNLMAKHIMSMDPGEEETEQLKKEYVTFMKGVVSAPLNLPGTAYHKALQSRATILKFIERKMEERKLDIKEEDQEEEEVKTEDEAEMSKSDHVRKQRTDDDLLGWVLKHSNLSTEQILDLILSLLFAGHETSSVAIALAIFFLQACPKAVEELREEHLEIARAKKELGESELNWDDYKKMDFTQCVINETLRLGNVVRFLHRKALKDVRYKGYDIPSGWKVLPVISAVHLDNSRYDQPNLFNPWRWQQQNNGASSSGSGSFSTWGNNYMPFGGGPRLCAGSELAKLEMAVFIHHLVLKFNWELAEDDKPFAFPFVDFPNGLPIRVSRIL

SEQ ID NO: 294 - DNA, 1470 bp, Populus balsamifera subsp. trichocarpa
  misc_feature (1)..(1470): Ceres GDNA ANNOT ID no. 1510416
atgtctcactcagagcttgttgtctttctccttccatcgattttatcactactcttgctcttcattctcgtgcaaagaaagcaagtaagatttaatctcccaccaggcaacatggggtggccatttcttggagaaaccattggctacctgaagccttactctgctacttcaataggagaattcatggaacagcacatatcaaggtatggaaagatttacaagtccaatttgtttggggagccaacaatagtatccgcagatgctggacttaacagatttatactacagaatgagggaagattatttgaatgcagctatccaaaaagtattggtggaattcttggaaaatggtccatgttggttcttgttggagacatgcatagagacatgaggattatatctcttaactttttgagccatgccaggttaagaactcatctattgaaagaagtggagaagcaaaccctgcttgttcttagctcttggaaggagaattgtacattttcagctcaagatgaagcaaagaagtttaccttcaatttgatggcaaaacatatcatgagcttggatcctggaaagccagagactgagcagctgaaaaaagagtatgttactttcatgaaaggagtagtttcagctcctataaatttgcctggaaccccatatagaaaagccttgaagtctcgatcaatcatcttgaaatttatagagcgaaagatggaggagagaattgctgaaacgaagggtggagtagaaaacttggaagacgatgatcttcttggatgggtcttgaagcattcaaatctttctacggagcaaatccttgacttaatcttaagcttgctctttgctggccacgaaacttcttctgtgtccatagctctagccatctacttcttgcaagcttgtcctggtgctattcaacagttaaaagaagaacatattcaaatctccagagccaagaaacggtcaggagagacggaattgaactgggatgattacaaaaaaatggaattcacccaatgcgttataagcgagacactgaggcttggaaacgtagtcaggtttcttcacagaaaagctctaaaagatgttcggtacaaagggtacgacattccatgtggatggaaagtgctaccagtgatctcagccgtccatttagattcaactcttttcgaccaacctcaacacttcaatccatggagatggcagcagcataacaatgctcgtggtgcttctacaagttcgagtgggacgacgagtagtaattacttcatgccatttgggggaggaccgcgactttgtgcaggatcggaattggcaaaactagaaatggccgtgttcatccaccatttggtcctcaacttccactgggaactggttgataccgatcaagcctttgcctttccttttgtcgattttcccaagggcttgcccataagagtcaagcacctactcacagttacatga

SEQ ID NO: 295 - protein, 452 aa, Populus balsamifera subsp. trichocarpa
  misc_feature (1)..(452): Ceres GDNA ANNOT ID no. 1510416
  misc_feature (1)..(452)
  Functional Homolog of CDNA ID no. 12724226at SEQ ID no. 293with e-value of 7E-195 and percent identity of 82.29
MGWPFLGETIGYLKPYSATSIGEFMEQHISRYGKIYKSNLFGEPTIVSADAGLNRFILQNEGRLFECSYPKSIGGILGKWSMLVLVGDMHRDMRIISLNFLSHARLRTHLLKEVEKQTLLVLSSWKENCTFSAQDEAKKFTFNLMAKHIMSLDPGKPETEQLKKEYVTFMKGVVSAPINLPGTPYRKALKSRSIILKFIERKMEERIAETKGGVENLEDDDLLGWVLKHSNLSTEQILDLILSLLFAGHETSSVSIALAIYFLQACPGAIQQLKEEHIQISRAKKRSGETELNWDDYKKMEFTQCVISETLRLGNVVRFLHRKALKDVRYKGYDIPCGWKVLPVISAVHLDSTLFDQPQHFNPWRWQQHNNARGASTSSSGTTSSNYFMPFGGGPRLCAGSELAKLEMAVFIHHLVLNFHWELVDTDQAFAFPFVDFPKGLPIRVKHLLTVT

SEQ ID NO: 296 - DNA, 1470 bp, Populus balsamifera subsp. trichocarpa
  misc_feature (1)..(1470): Ceres GDNA ANNOT ID no. 1541253
atgtctcactcagagcttgttgtgcttctccttccttcaattttatctctactcctggtcttcattctcatgcaaagaaagcaagcaagatttaatctcccacctggcaacatgggctggccatttcttggagaaactattggctacttgaagccttactctgctacttcaataggggaattcatggaacaacacatatcaaggtatggaaagatttacaagtccaatttgtttggggagccgacaatagtatctgcagatgctggacttaacagatttatactccagagtgaaggaagattgtttgaatgcagctatccaagaagtattggtggaattcttggaaaatggtctatgctggttctagttggagacatgcatagaaacatgaggagtatatctctcaactttttgagccatgccaggttaagaagtcatctattgaaagaagtggagaagcaaaccttgcttgttcttagttcttggaaggagaattgtacattttcagctcaagatgaagcaaagaagtttaccttcaatttgatggcaaaacatatgatgagcttggatcctggaaagccagagactgagcagctgaagaaagagtatgttactttcatgaaaggagtggtttctgctccactaaattttcctggaacaccgtatagaaaagccttgaagtctcgatcaatcatccttaaatttatagagcaaaaaatggaagagagaattgctagattgaaggagggagtggaagatttagaggaagatgatcttcttggatgggttttgaagcattcaaatctttctaccgagcaaatccttgacttgatattaagcttgctctttgctggccatgaaacttcttctgtctccatagctttagccatctacttcttgcaagcttgtcccggtgctattcaacagttaaaagaagaacatattgaaatttccagagccaagaaacagtcaggagagatggaaataaactgggatgattacaaaaaaatggaattcactcaatgtgttataagtgagacactgaggcttggaaacgtagtcaggttccttcatagaaaagctgtcagagatgttcgctataaagggtatgacattccatgtggatggaaagtgctgccagtgatctcagccgtgcatttagattctactgtttttgaccagcctcaacagttcaatccatggagatggcagcagcacaacaatgctcgtggatcttctacttgttcgagtgcggcggcggcgagtagtaatcacttcatgccatttgggggaggaccgcgactctgtgcaggatcggaattggcaaaacttgaaatggcagttttcattcaccatttggttctgaacttccattgggaattggtcggtgccgatcaagcctttgcctttccttttgttgattttcctaaaggcttgccaataagagtcaagcaccacacagtcatataa

SEQ ID NO: 297 - protein, 466 aa, Populus balsamifera subsp. trichocarpa
  misc_feature (1)..(466): Ceres GDNA ANNOT ID no. 1541253
  misc_feature (1)..(466)
  Functional Homolog of CDNA ID no. 12724226at SEQ ID no. 293with e-value of 6.1E-196 and percent identity of 79.48
MQRKQARFNLPPGNMGWPFLGETIGYLKPYSATSIGEFMEQHISRYGKIYKSNLFGEPTIVSADAGLNRFILQSEGRLFECSYPRSIGGILGKWSMLVLVGDMHRNMRSISLNFLSHARLRSHLLKEVEKQTLLVLSSWKENCTFSAQDEAKKFTFNLMAKHMMSLDPGKPETEQLKKEYVTFMKGVVSAPLNFPGTPYRKALKSRSIILKFIEQKMEERIARLKEGVEDLEEDDLLGWVLKHSNLSTEQILDLILSLLFAGHETSSVSIALAIYFLQACPGAIQQLKEEHIEISRAKKQSGEMEINWDDYKKMEFTQCVISETLRLGNVVRFLHRKAVRDVRYKGYDIPCGWKVLPVISAVHLDSTVFDQPQQFNPWRWQQHNNARGSSTCSSAAAASSNHFMPFGGGPRLCAGSELAKLEMAVFIHHLVLNFHWELVGADQAFAFPFVDFPKGLPIRVKHHTVI

SEQ ID NO: 298 - protein, 496 aa, Zinnia elegans
  misc_feature (1)..(496): Public GI no. 71834076
  misc_feature (1)..(496)
  Functional Homolog of CDNA ID no. 12724226at SEQ ID no. 293with e-value of 1.3E-185 and percent identity of 74.11
MCSTTLNMCDLEFFILASCLVLALFLILKLVKRRTNNGSTRNLPPGNMGWPFIGETIGYLQPYSATTIGKFMEQHISKYGKIYKSSLFGEPTIVSADPGLNKYILQNEGRLFECSYPRSIGGILGKWSMLVLVGDMHRDMRQISLNFLSNARLKTQLVNEVEKNTLWVLDSWKENSPFCAQEEAKKFTFNLMATHIMSLDPGEPETERLKKEYVTFMKGVVSPPLNFPGTAYWKALKSRATILKFIETKMEERIRMDEGNGLGKLDNDLLGWSMKNSNLTKEQILDLVLSLLFAGHETSSVSISLAVYFLEACPTAVRQLREEHEEIVMKKKLLGEKYLTWDDYKKMEFTQCVINETLRFGNVVRFLHRKAIKDVRYKGYDIPCGWKVLPVIAAVHLDPTHFDQPYLFDPWRWQNASVTSSTCSTPPSASNFMPFGGGPRLCTGSELAKLEMAIFIHHLVLKYEWELVDSDEAFAYPYLDFPKGLPIKIRHRKQSC

SEQ ID NO: 299 - protein, 506 aa, Oryza sativa subsp. japonica
  misc_feature (1)..(506): Public GI no. 60677681
  misc_feature (1)..(506)
  Functional Homolog of CDNA ID no. 12724226at SEQ ID no. 293with e-value of 0 and percent identity of 73.89
MAAMMASITSELLFFLPFILLALLTFYTTTVAKCHGGHWWRGGTTPAKRKRMNLPPGAAGWPLVGETFGYLRAHPATSVGRFMEQHIARYGKIYRSSLFGERTVVSADAGLNRYILQNEGRLFECSYPRSIGGILGKWSMLVLVGDPHREMRAISLNFLSSVRLRAVLLPEVERHTLLVLRAWPPSSTFSAQHQAKKFTFNLMAKNIMSMDPGEEETERLRREYITFMKGVVSAPLNLPGTPYWKALKSRAAILGVIERKMEERVEKLSKEDASVEQDDLLGWALKQSNLSKEQILDLLLSLLFAGHETSSMALALAIFFLEGCPKAVQELREEHLGIARRQRLRGECKLSWEDYKEMVFTQCVINETLRLGNVVRFLHRKVIKDVHYKGYDIPSGWKILPVLAAVHLDSSLYEDPQRFNPWRWKSSGSSGGLAQSSSFMPYGGGTRLCAGSELAKLEMAVFLHHLVLNFRWELAEPDQAFVFPFVDFPKGLPIRVHRIAQDDEQE

SEQ ID NO: 300 - protein, 502 aa, Oryza sativa subsp. japonica
  misc_feature (1)..(502): Public GI no. 34902330
  misc_feature (1)..(502)
  Functional Homolog of CDNA ID no. 12724226at SEQ ID no. 293with e-value of 0 and percent identity of 69.31
MASITSELLFFLPFILLALLTFYTTTVAKCHGGHWWRGGTTPAKRKRMNLPPGAAGWPLVGETFGYLRAHPATSVGRFMEQHIARYGKIYRSSLFGERTVVSADAGLNRYILQNEGRLFECSYPRSIGGILGKWSMLVLVGDPHREMRAISLNFLSSVRLRAVLLPEVERHTLLVLRAWPPSSTFSAQHQAKKFTFNLMAKNIMSMDPGEEETERLRREYITFMKGVVSAPLNLPGTPYWKALKSRAAILGVIERKMEERVEKLSKEDASVEQDDLLGWALKQSNLSKEQILDLLLSLLFAGHETSSMALALAIFFLEGCPKAVQELREEHLGIARRQRLRGECKLSWEDYKEMVFTQCVINETLRLGNVVRFLHRKVIKDVHYKGYDIPSGWKILPVLAAVHLDSSLYEDPQRFNPWRWKSSGSSGGLAQSSSFMPYGGGTRLCAGSELAKLEMAVFLHHLVLNFRWELAEPDQAFVFPFVDFPKGLPIRVHRIAQDDEQE

SEQ ID NO: 301 - protein, 502 aa, Zea mays
  misc_feature (1)..(502): Ceres CLONE ID no. 1578373
  misc_feature (1)..(502)
  Functional Homolog of CDNA ID no. 12724226at SEQ ID no. 293with e-value of 0 and percent identity of 73.72
MASITSELLFFLPFILLALLALYTTTVAKCHGTHPWRRQKKKRPNLPPGARGWPLVGETFGYLRAHPATSVGRFMERHVARYGKIYRSSLFGERTVVSADAGLNRYILQNEGRLFECSYPRSIGGILGKWSMLVLVGDAHREMRAISLNFLSSVRLRAVLLPEVERHTLLVLRSWPPSDGTFSAQHEAKKFTFNLMAKNIMSMDPGEEETERLRLEYITFMKGVVSAPLNFPGTAYWKALKSRASILGVIERKMEDRLEKMSREKSSVEEDDLLGWALKQSNLSKEQILDLLLSLLFAGHETSSMALALAIFFLEGCPKAVQELREEHLLIARRQRLRGASKLSWEDYKEMVFTQCVINETLRLGNVVRFLHRKVIRDVHYNGYDIPRGWKILPVLAAVHLDSSLYEDPSRFNPWRWKSNNAPSSFMPYGGGPRLCAGSELAKLEMAIFLHHLVLNFRWELAEPDQAFVYPFVDFPKGLPIRVQRVADDQGHRSVLTESTRG

SEQ ID NO: 302 - protein, 504 aa, Zea mays
  misc_feature (1)..(504): Ceres CLONE ID no. 1583137
  misc_feature (1)..(504)
  Functional Homolog of CDNA ID no. 12724226at SEQ ID no. 293with e-value of 0 and percent identity of 73.39
MASITSELLFFLPFILLALLALYTTTVAKCHGTHQWRRQKKKRPNLPPGARGWPLVGETFGYLRAHPATSVGRFMERHVARYGKIYRSCLFGERTVVSADAGLNRYILQNEGRLFECSYPRSIGGILGKWSMLVLVGDAHREMRAISLNFLSSVRLRAVLLPEVERHTLLVLRSWPPSDGTFSAQHEAKKFTFNLMAKNIMSMDPGEEETERLRLEYITFMKGVVSAPLNFPGTAYWKALKSRASILGVIERKMEDRLEKMSREKSSVEEDDLLGWALKQSNLSKEQILDLLLSLLFAGHETSSMALALAIFFLEGCPKAVQELREEHLLIARRQRLRGASKLSWEDCKEMVFTQCVINETLRLGNVVRFLHRKVIRDVHYNGYDIPRGWKILPVLAAVHLDSSLYEDPSRFNPWRWKLQSNNAPSSFMPYGGGPRLCAGSELAKLEMAIFLHHLVLNFRWELAEPDQAFVYPFVDFPKGLPIRVQRVADDQGHRSVLTESTRG

SEQ ID NO: 303 - protein, 480 aa, Oryza sativa subsp. japonica
  misc_feature (1)..(480): Public GI no. 50058152
  misc_feature (1)..(480)
  Functional Homolog of CDNA ID no. 12724226at SEQ ID no. 293with e-value of 1.9E-101 and percent identity of 45.96
MVGGELVLAALVILLALLLTLVLSHFLPLLLNPKAPKGSFGWPLLGETLRFLSPHASNTLGSFLEDHCSRYGRVFKSHLFCTPTIVSCDQELNHFILQNEERLFQCSYPRPIHGILGKSSMLVVLGEDHKRLRNLALALVTSTKLKPSYLGDIEKIALHIVGSWHGKSKDKGMVNVIAFCEEARKFAFSVIVKQVLGLSPEEPVTAMILEDFLAFMKGLISFPLYIPGTPYAKAVQARARISSTVKGIIEERRNAGSSNKGDFLDVLLSSNELSDEEKVSFVLDSLLGGYETTSLLISMVVYFLGQSAQDLELVKREHEGIRSKKEKDEFLSSEDYKKMEYTQHVINEALRCGNIVKFVHRKALKDVRYKEYLIPSGWKVLPVFSAVHLNPLLHGNAQQFQPCRWEGASQGTSKKFTPFGGGPRLCPGSELAKVEAAFFLHHLVLNYRWRIDGDDIPMAYPYVEFQRGLPIEIEPLCSES

SEQ ID NO: 304 - protein, 480 aa, Zea mays
  misc_feature (1)..(480): Ceres CLONE ID no. 390429
  misc_feature (1)..(480)
  Functional Homolog of CDNA ID no. 12724226at SEQ ID no. 293with e-value of 2E-99 and percent identity of 44.21
MMMMAGEHVLAALATLLLASLLTLVLNHFLPLLLNPKAPRGSFGWPLLGETLRFLTPHASNTLGGFLEDHCSRYGRVFKSHLFCTPTVVSCDQDLNHFILQNEERLFQCSYPRPIHGILGKSSMLVVLGEDHKRLRNLALALVTSTKLKPSYLGDIEKIALHVVGAWRRHGGVRVVAFCEEARKFAFSVIVKQVLGLSPEEPVTARILEDFLAFMKGLISFPLYIPGTPYAKAVRARERISSTVKGIIKERRSAGSWNKQGDFLDVLLSSNELSDEEKVSFVLDSLLGGYETTSLLISMVVYFLGQSAQDLDLVKREHDSIRSNKGKEECLTSEDYKKMEYTQQVINEALRCGNIVKFVHRKALKDVKYKEYLIPSGWKVLPVFTAVHLNPSLHGDAQQFQPCRWEGTSQGTSKRFTPFGGGPRLCPGSELAKVETAFFLHHLVLNYRWRIDGDDIPMAYPYVEFQRGLPIEIEPTSPES

SEQ ID NO: 305 - protein, 485 aa, Zea mays
  misc_feature (1)..(485): Ceres CLONE ID no. 234510
  misc_feature (1)..(485)
  Functional Homolog of CDNA ID no. 12724226at SEQ ID no. 293with e-value of 8.6E-99 and percent identity of 44.73
MMMMMMAGEHVLAALGTLLLASLLTLVLNHFLPLLLNPKAPRGSFGWPLLGETLRFLTPHASNTLGGFLEDHCSRYGRVFKSHLFCTPTVVSCDQDLNHFILQNEERLFQCSYPRPIHGILGKSSMLVVLGEDHKRLRNLALALVTSTKLKPSYLGDIEKIALHVVGAWRRHGSSGGVRVVAFCEEARKFAFSVIVKQVLGLSPEEPVTARILEDFLAFMKGLISFPLYIPGTPYAKAVRARERISSTVKGIIKERRSAGSWNKQGDFLDVLLSSNELSDEEKVSFVLDSLLGGYETTSLLISMVVYFLGQSAQDLDLVKREHDSIRSNKGKEECLTSEDYKKMEYTQQVINEALRCGNIVKFVHRKALKDVKYKEYLIPSGWKVLPVFTAVHLNPSLHGDAQQFQPCRWEGTSQGTSKRFTPFGGGPRLCPGSELAKVETAFFLHHLVLNYRWRIDGDDIPMAYPYVEFQRGLPIEIEPTSPES

SEQ ID NO: 306 - DNA, 1419 bp, Populus balsamifera subsp. trichocarpa
  misc_feature (1)..(1419): Ceres GDNA ANNOT ID no. 1472214
atggctggagagctctgggttggtgttttggttggtataactagtggtctgttgggtctaataatgaatcattttctgcccatgttcttgaagcttggtcataatgtcccaaagggctcttttgggtggcctctacttggtgaaaccctcggtttcttgaaacctcacccttctaacacccttggtgcgtttcttcaagatcattgttccaggtacgggaatgtgttcaagtcccatttatttctctctccaacagtggtgtcctgtgaccaggagctgaactatttcattcttcaaaacgaaggcaagttattccagtgcagttatcctaagcctattcacggaattcttggcaatgtctccatgctggtggctgttggtgatactcacaagagactcagaaatgtggctatctctctagttagcattactaaatcaaagccagagttcttgaatgacatagaaagaactgccattcaaatattgagctcctggaaagataaacaacaggtcgtgttctgtgaagaggctagaaagttctcattcaatgtaatagtaaagcaagtgcttggtttaacatcagaggagccggagactagagaaattcttgaagattttcttacttttatgagaggactagtatccatccctctgtatattcctggtactccatatgctagagctgttcaggctagaagcaggatatcttctagagttaaagcaattatagaggaaagaagatcaagaaatagtaggagtttaaggaatgattttcttgaaatacttctaagtgttgataccttatctgaagatgaaaaggtgagctttgtgttggattctcttttgggtgggtatgaaactacctcgctcttaatggccatggtggtgcatcttctaggccagtcacccactgcattagaacagttaaagctagagcatgagcaaataacaagcctgaaggagaaagatgagtgtttgaattgggaagattataagacgatggaattcactcaaaatgtcatcagtgaagcactgagatatggaaacattgtgaaatttgtacaccgaaaggctctcaaagacgtaaagttcagagactacctcattccatctgggtggaaggtcctacctgtttttacagctgtgcatttagactcgtctgtccatgcaaatgctctccagtttcatccttggagatgggagactcaggatcagactagcaagaggtttaccccttttggtggaggatctagatgctgtcccggatctgaacttgccaagattgaggttgccttcttccttcaccaccttgttcagaacttcagatggacagccgaggatgctgaccaacccatggcatatccatacgttgaatttggaaaagggctgttgataaatttggatcgttgttccacctga

SEQ ID NO: 307 - protein, 451 aa, Populus balsamifera subsp. trichocarpa
  misc_feature (1)..(451): Ceres GDNA ANNOT ID no. 1472214
  misc_feature (1)..(451)
  Functional Homolog of CDNA ID no. 12724226at SEQ ID no. 293with e-value of 4.7E-102 and percent identity of 46.47
MNHFLPMFLKLGHNVPKGSFGWPLLGETLGFLKPHPSNTLGAFLQDHCSRYGNVFKSHLFLSPTVVSCDQELNYFILQNEGKLFQCSYPKPIHGILGNVSMLVAVGDTHKRLRNVAISLVSITKSKPEFLNDIERTAIQILSSWKDKQQVVFCEEARKFSFNVIVKQVLGLTSEEPETREILEDFLTFMRGLVSIPLYIPGTPYARAVQARSRISSRVKAIIEERRSRNSRSLRNDFLEILLSVDTLSEDEKVSFVLDSLLGGYETTSLLMAMVVHLLGQSPTALEQLKLEHEQITSLKEKDECLNWEDYKTMEFTQNVISEALRYGNIVKFVHRKALKDVKFRDYLIPSGWKVLPVFTAVHLDSSVHANALQFHPWRWETQDQTSKRFTPFGGGSRCCPGSELAKIEVAFFLHHLVQNFRWTAEDADQPMAYPYVEFGKGLLINLDRCST

SEQ ID NO: 308 - protein, 479 aa, Glycine max
  misc_feature (1)..(479): Ceres CLONE ID no. 690176
  misc_feature (1)..(479)
  Functional Homolog of CDNA ID no. 12724226at SEQ ID no. 293with e-value of 9.9E-98 and percent identity of 43.95
MASFIFTPVLFLLIISAVLLFLHRRSRCRRFRLPPGTLGLPFVGETLQLISAYKSDNPEPFMDQRVKRYGPIFTTHVFGEPTVFSTDPETNRFILLNEGKLFECSYPGSISNLLGKHSLLLMKGSLHKRMHSLTMSFANSSIIKDHLLVDIDRLIRLNLDSWSDRVLLMEEAKKITFELTVKQLMSFDPGEWTETLRKEYVLVIEGFFSVPLPLFSSTYRRAIKARTKVAEALTLVVRDRRKESVTEEKKNDMLGALLASGYHFSDEEIVDFMLALLVAGYETTSTIMTLAIKFLTETPLALAQLKEEHDQIRAKKSCPEAPLEWTDYKSMAFTQCVVNETLRVANIIGAIFRRAMTDINIKGYTIPKGWRVVASFRAVHLNPDHFKDARTFNPWRWQSNSEASSPGNVYTPFGGGPRLCPGYELARVVLSVFLHRIVTRYSWFPAEEDKLVFFPTTRTQKRYPIIVKRREESKLSKSP

SEQ ID NO: 309 - protein, 483 aa, Nicotiana tabacum; identical to SEQ ID NO: 177
  misc_feature (1)..(483): Public GI no. 45260636
  misc_feature (1)..(483)
  Functional Homolog of CDNA ID no. 12724226at SEQ ID no. 293with e-value of 5.8E-93 and percent identity of 42.86

SEQ ID NO: 310 - DNA, 1024 bp, Arabidopsis thaliana
  misc_feature (1)..(1024): Ceres CDNA ID no. 13499809
  misc_feature (1)..(1024): Also Known As  Ceres SEEDLINE ME04680
  misc_feature (1)..(1024): Also Known As  Ceres CLONE ID no. 1952
ccgagagtgaagaaggtatgtctggaagtgaaggaggtatgtctggtggtggaggaagtaaatccaaaagtaaaaaaagtaaactcaaagctaaattgggaaagaaaaaaggtatgtccggaggcatgtcaggaagtgaagaaggtatgtttggaagtgaaggaggtatgtccagtggtggaggaagtaaatccaaaagtaaaaaaagtaaactcaaagctaaattgggaaagaaaaaaggtatgtccggaggcatgtcaggaagtgaagaaggtatgtctggaagtgaaggaggtatgtccggaggtggaggaggtaaatccaaaagtagaaaaagtaaactcaaagctaaattgggaaagaaaaaatgtatgtacggaggcatgtcaggaagtgaaggaggtatgtctggaagtgaaggaggtatatccggaggtggtatgtctgggggcagtggaagtaaacacaaaattggaggaggtaaacacggaggtcttggaggtaaattcggaaagaaaagaggcatgtccggaagtggaggaggcatgtcaggaagtgaaggaggtgtgtctggaagtgaaggaagtatgtccggaggtggtatgtctgggggtagcggaagtaaacacaaaattggaggaggtaaacacggaggtcttagaggtaaattcggaaagaaaagaggtatgtcaggaagtgaaggaggtatgtctggaagtgaaggaggtgtgtcggaaagtggtatgtccgggagtggagggggtaaacacaaaatcggaggaggtaaacacaaatttggaggaggtaaacacggaggtggaggtggccacatggcggagtaaagaacaatggtcaagttgttccaacattaagcagatcattgtgcattagttcaagattgtatgattgggaaagtaaaagaaagaaaaaatattttctaataagttttatgtttatatgtaatgttgaatctgattattatgataaaaagacataaatgtgatacaatgtttattttaagagc

SEQ ID NO: 311 - protein, 133 aa, Arabidopsis thaliana
  misc_feature (1)..(133): Ceres CDNA ID no. 13499809
  misc_feature (1)..(133): Also Known As  Ceres SEEDLINE ME04680
  misc_feature (1)..(133): Also Known As  Ceres CLONE ID no. 1952
  misc_feature: Phenotype: INFLORESCENCE Useful for making ornamental plants with modified flowers
  misc_feature: Phenotype: ROSETTE LEAVES Useful for making ornamental plants with modified leaves
  misc_feature: Phenotype: Disorganized Rosette Useful for making plants with increased biomass
  misc_feature: Phenotype: Lanceolate Shaped Useful for making plants with increased biomass and foliage
MSGGSGSKHKIGGGKHGGLGGKFGKKRGMSGSGGGMSGSEGGVSGSEGSMSGGGMSGGSGSKHKIGGGKHGGLRGKFGKKRGMSGSEGGMSGSEGGVSESGMSGSGGGKHKIGGGKHKFGGGKHGGGGGHMAE

SEQ ID NO: 312 - protein, 162 aa, Physcomitrella patens
  misc_feature (1)..(162): Public GI no. 21388658
  misc_feature (1)..(162)
  Functional Homolog of CDNA ID no. 13499809at SEQ ID no. 311with e-value of 3.3E-07 and percent identity of 54.24
MAGGEEFRCFVGGLAWATTDGRLEGAFRPFGEVVQSKVISDRETGRSRGFGFVTFADENSMNAAIKEMNGQELDGRNITVNQAQSRGGGGGGGGGGGGYGRREQGGGGYGGGYGGSRGGGDREGSGYGGSRGGGYGGGGGGGYGGRGGPSSGNWRNDRQPEY

SEQ ID NO: 313 - protein, 155 aa, Picea glauca
  misc_feature (1)..(155): Public GI no. 4704605
  misc_feature (1)..(155)
  Functional Homolog of CDNA ID no. 13499809at SEQ ID no. 311with e-value of 2.6E-07 and percent identity of 52.63
MASADVEFRCFVGGLAWSTDDRSLQEAFSPYGEVVESKIISDRETGRSRGFGFVTFNDEQSMRDAIDAMNGKMLDGRSITVNPAQSRGNGGGGGGGGSRGYRGGGGGGGYGGSRDRGDRGYGGGGGGYGGGGGGYGGGGGSRYGGGGSEGGSWRR

SEQ ID NO: 314 - protein, 170 aa, Sorghum bicolor
  misc_feature (1)..(170): Public GI no. 10799202
  misc_feature (1)..(170)
  Functional Homolog of CDNA ID no. 13499809at SEQ ID no. 311with e-value of 5.2E-09 and percent identity of 50.67
MAAADVEYRCFVGGLAWATNNETLEHAFANFGQVLDSKVITDRETGRSRGFGFVTFSSEQSMLDAIENMNGKELDGRNITVNQAQSRGGGGGGGGYGGGGGGYGGRREGGGYGGGGGGYGGRREGGGGYGGGGYGGGGGGYGGRREGGGGYGGGGGYGGNRGDSGGNWRN

SEQ ID NO: 315 - protein, 129 aa, Parthenium argentatum
  misc_feature (1)..(129): Ceres CLONE ID no. 1605245
  misc_feature (1)..(129)
  Functional Homolog of CDNA ID no. 13499809at SEQ ID no. 311with e-value of 8.8E-07 and percent identity of 50.67
MASKTFLLLAIAFAVVLLITSEVAAAEDLASNHLDGTTGEVDGRGGYNRGGRGGYNGGGHGGYNGGGRGGHNGGGHEGHGKGGGRGGSGGGRHGSCKYGCCGGGRYNHGGGCKCCSSFEEATAYKQTQN

SEQ ID NO: 316 - protein, 120 aa, Capsella bursa-pastoris
  misc_feature (1)..(120): Public GI no. 9957568
  misc_feature (1)..(120)
  Functional Homolog of CDNA ID no. 13499809at SEQ ID no. 311with e-value of 9.7E-08 and percent identity of 50.00
MASKTLILLGLFAILLVVSEVSAARESGMVKPESEETVQPEGYGGHGGHGGHGGHGGHGGHGHGGGGHGLDGYHGGHGGHGGGYNGGGGHGGHGGGYNGGGHHGGGGHGLNEPVQTQPGV

SEQ ID NO: 317 - DNA, 1014 bp, Arabidopsis thaliana
  misc_feature (1)..(1014): Ceres CDNA ID no. 12321174
  misc_feature (1)..(1014): Also Known As  Ceres SEEDLINE ME04682
  misc_feature (1)..(1014): Also Known As  Ceres CLONE ID no. 8161
ctctctctcttaaagctctcttctttggctctttcgaagaagaaccatttttatttcctaagagagacgacggagttcttttctaaagcaccggagaggaggagaagcaacgatggagaatgattgcacggtgaatattgtctctctggagaaggatcgcgatgtttcggaggcgtcggctgaatctcagagcgagtcgactctttcgaactcgctcgattccggtgttacggctgagacctctcgttctgatgctgattccaaactggatgaatgtactgcttggacgaatgagaaacacaactcatatcttgattatttagagagctcgtttgttaggcaattatactccttgcttggaggtgggactcagagactttctagaactcgtgatgtgcagtctaactctcataaatcagctgatcagtttaccgtcctacaaaatggttgctggcagaaggttaactttggaaagaaacaatcttgtttggagacttcatctgagtttcgttttcacagaaattcattgagaaataagcctgaaaattccaacggaaattacaccatgggaactactgtccaaggagatgtgttatgtcatgacgaaaccaaacactcagaggcgtcagggcagaatttcagagaagaagaagaagaagaagagaagggagaggtgagcaaaaaacgagaaagagaagcaaataacgatgatagttcattgaaggaggatcaggttgtgccggtaaggatggtgaagcccagaacgtgaaagcattaggaagtgtagatgaaatactatgaatagagataaagaaatagaagaaggtgtggttacgaatgtggagagggttttgtttgttgtatagcgtgaggctaaagagagccttccttataaagggatccaatgggatatggaaataggattggtgtttgttttcgttaaattttgtctaatgttaactaggggaaaagttatctgatagtattagcatcttatggcaattttattctttt

SEQ ID NO: 318 - protein, 218 aa, Arabidopsis thaliana
  misc_feature (1)..(218): Ceres CDNA ID no. 12321174
  misc_feature (1)..(218): Also Known As  Ceres SEEDLINE ME04682
  misc_feature (1)..(218): Also Known As  Ceres CLONE ID no. 8161
  misc_feature: Phenotype: WHOLE PLANT Useful for making bigger plants
  misc_feature: Phenotype: FLOWER Useful for making ornamental plants with modified flowers
  misc_feature: Phenotype: INFLORESCENCE Useful for making ornamental plants with modified flowers
  misc_feature: Phenotype: ROSETTE LEAVES Useful for making ornamental plants with modified leaves
  misc_feature: Phenotype: Disorganized Rosette Useful for making plants with increased biomass
  misc_feature: Phenotype: Short Useful for making shorter plants
  misc_feature: Phenotype: Short Internode Useful for making shorter plants and plants with modified flowers
  misc_feature: Phenotype: Reduced fertility Useful for sterility, genetic confinement systems
MENDCTVNIVSLEKDRDVSEASAESQSESTLSNSLDSGVTAETSRSDADSKLDECTAWTNEKHNSYLDYLESSFVRQLYSLLGGGTQRLSRTRDVQSNSHKSADQFTVLQNGCWQKVNFGKKQSCLETSSEFRFHRNSLRNKPENSNGNYTMGTTVQGDVLCHDETKHSEASGQNFREEEEEEEKGEVSKKREREANNDDSSLKEDQVVPVRMVKPRT

SEQ ID NO: 319 - DNA, 1381 bp, Arabidopsis thaliana
  misc_feature (1)..(1381): Ceres CDNA ID no. 12562634
  misc_feature (1)..(1381): Also Known As  Ceres SEEDLINE ME04689
  misc_feature (1)..(1381): Also Known As  Ceres CLONE ID no. 123905
aaaacacaaacaaaactcatattttcaatctccaggtgctttacaccaacagagtcgcaagaaaacaaaaaccaaactcggatttagtttgacagaagaaggaatcgagagtcgggtatgcattatcctaacaacagaaccgaattcgtcggagctccagccccaacccggtatcaaaaggagcagttgtcaccggagcaagagctttcagttattgtctctgctttgcaacacgtgatctcaggggaaaacgaaacggcgccgtgtcagggtttttccagtgacagcacagtgataagcgcgggaatgcctcggttggattcagacacttgtcaagtctgtaggatcgaaggatgtctcggctgtaactactttttcgcgccaaatcagagaattgaaaagaatcatcaacaagaagaagagattactagtagtagtaacagaagaagagagagctctcccgtggcgaagaaagcggaaggtggcgggaaaatcaggaagaggaagaacaagaagaatggttacagaggagttaggcaaagaccttggggaaaatttgcagctgagatcagagatcctaaaagagccacacgtgtttggcttggtactttcgaaaccgccgaagatgcggctcgagcttatgatcgagccgcgattggattccgtgggccaagggctaaactcaacttcccctttgtggattacacgtcttcagtttcatctcctgttgctgctgatgatataggagcaaaggcaagtgcaagcgccagtgtgagcgccacagattcagttgaagcagagcaatggaacggaggaggaggggattgcaatatggaggagtggatgaatatgatgatgatgatggattttgggaatggagattcttcagattcaggaaatacaattgctgatatgttccagtgataaatgagctctttcttgttggcgttttttggagttaagtgcaagaagagattgacactgtggcttgtttaaagtgaacaagaacaagaaagcatgtaattagtagtctcattcttttgtttgtggtcaattctatgtttatctcatataaaatctgagttaaacctatctgaggagagagtaaataaagaggttaagaaacccaacattggtctgaattataaacgtaagtgtcaacgttgtttataaaggagaaaactataattggtgacaaaagacataaagaaaagatgtctactcctacaaagcatcgcgtgcagctattcgacaaacaatggcatctcccagagaggaaattccgagctcttggctagttatcttgtaatgctgaaaacatgaatgtatttgagtttatttctgtaacattggaagcgaaataaaagggttatcaactgtt

SEQ ID NO: 320 - protein, 268 aa, Arabidopsis thaliana
  misc_feature (1)..(268): Ceres CDNA ID no. 12562634
  misc_feature (1)..(268): Also Known As  Ceres SEEDLINE ME04689
  misc_feature (1)..(268): Also Known As  Ceres CLONE ID no. 123905
  misc_feature (134)..(197): Pfam Name: AP2 Pfam Description: AP2 domain
  misc_feature: Phenotype: INFLORESCENCE Useful for making ornamental plants with modified flowers
  misc_feature: Phenotype: ROSETTE LEAVES Useful for making ornamental plants with modified leaves
  misc_feature: Phenotype: Lanceolate Shaped Useful for making plants with increased biomass and foliage
  misc_feature: Phenotype: Short Useful for making shorter plants
  misc_feature: Phenotype: Reduced fertility Useful for sterility, genetic confinement systems
MHYPNNRTEFVGAPAPTRYQKEQLSPEQELSVIVSALQHVISGENETAPCQGFSSDSTVISAGMPRLDSDTCQVCRIEGCLGCNYFFAPNQRIEKNHQQEEEITSSSNRRRESSPVAKKAEGGGKIRKRKNKKNGYRGVRQRPWGKFAAEIRDPKRATRVWLGTFETAEDAARAYDRAAIGFRGPRAKLNFPFVDYTSSVSSPVAADDIGAKASASASVSATDSVEAEQWNGGGGDCNMEEWMNMMMMMDFGNGDSSDSGNTIADMFQ

SEQ ID NO: 321 - DNA, 1217 bp, Arabidopsis thaliana
  misc_feature (1)..(1217): Ceres CDNA ID no. 12323989
  misc_feature (1)..(1217): Also Known As  Ceres SEEDLINE ME05367
  misc_feature (1)..(1217): Also Known As  Ceres CLONE ID no. 11854
acatcgctctatttatctctctttcccaaatctggaaaatttagggttccaacaaaaacgcgatcgcattacccaaaaattcaaatttgcaactgatttcgtcctgtttgaatcactccaattctattgctttcttcgtcgtttgatccaaaacagtgagaagcgatacaccattttttctgggtgtgtgaatttttattttaccccaaattagattagagacgatgagcgacgtcaccggtgatctcgcggcggtgagtgaagccaagggaggttctgacgccgcccggatatcggaggtgaaggcgtggctcacctctcagttcgaagctgtcggcaaagaagtacccaatttcgagtacactcatcgaagcattacccatttgtataatctcgctaccgcttctcaagctaagtctcaggctgccaccattgtcgctaacgattttcgtctcaaggcttcagaatatcgtgctcaagcggctaggattagagagatattggagagtgcaggaatgtcacaagagagcttaccgtcaaatgtggtctcttcagctcaagttcttgcaaatgtggctaatttgttgaacatacgggacactgaactgagcagtttccttgtagcaatgggagacatatctctgaggaagactggagtggaagagaagagggctaaagcacagaaggagtccaatgctcttcttgactatacaaggaaagcgatacagaggctgacgtatttgaagaaaatccttgcgcagctagaagatgatgtagtcccttgtgaatcacagatggagaactggaaaacaaatttggaagtgatggcggtgaaggaggaacaatacatacagcagtacaagaagtatgagatgttactcaatcgtgttggctacactcctaagatcagccacagagagctggtagaaatggcagagcaccggaaggaattggacaagatgacaaaaccagtccttgatactctacgaagctaccaggatttacctccggacaaagctttagctgcactagcaatcgaagacaagaaaagacagtttacagccgcggaaaagtatctagaagaagtattacaatcagcccttgagacaaacgatgagtgatcgatataaaccagaaaatattatgttttgggaatatgtaacatatgttttgtaatgcaacaatctctcggttattaaactctactggtgagatag

SEQ ID NO: 322 - protein, 298 aa, Arabidopsis thaliana
  misc_feature (1)..(298): Ceres CDNA ID no. 12323989
  misc_feature (1)..(298): Also Known As  Ceres SEEDLINE ME05367
  misc_feature (1)..(298): Also Known As  Ceres CLONE ID no. 11854
  misc_feature: Phenotype: Late Flowering Useful for delaying flowering time
  misc_feature: Phenotype: Dark Green Useful for increasing chlorophyll and photosynthetic capacity
  misc_feature: Phenotype: Long Petioles Useful for making plants that grow better in shade
  misc_feature: Phenotype: Short Useful for making shorter plants
MSDVTGDLAAVSEAKGGSDAARISEVKAWLTSQFEAVGKEVPNFEYTHRSITHLYNLATASQAKSQAATIVANDFRLKASEYRAQAARIREILESAGMSQESLPSNVVSSAQVLANVANLLNIRDTELSSFLVAMGDISLRKTGVEEKRAKAQKESNALLDYTRKAIQRLTYLKKILAQLEDDVVPCESQMENWKTNLEVMAVKEEQYIQQYKKYEMLLNRVGYTPKISHRELVEMAEHRKELDKMTKPVLDTLRSYQDLPPDKALAALAIEDKKRQFTAAEKYLEEVLQSALETNDE

SEQ ID NO: 323 - protein, 274 aa, Zea mays
  misc_feature (1)..(274): Ceres CLONE ID no. 1493656
  misc_feature (1)..(274)
  Functional Homolog of CDNA ID no. 12323989at SEQ ID no. 311with e-value of 8.4E-72 and percent identity of 61.83
MWEGEAVAEVRRRSCRWVPTPHRAGWPTSASLASASQGRSRAAGIAAAGLRAQAAEYRAEAARLREALERAGLARDALPPPAAAAARAVAAVANLLAIRDTEMSSFVVASADLSLRRAEVEEKRDKVHKESKALLDYTRKAINKLTELKKMLEKFKNDVEKQQVEQMTDWQTKLVMMDSKERQYILQVSNYKAMLNRVGYTPEINHGVLMEMAEHKKDLERKTKPIADTLRSYQDLPPDKALAALAIEDKKRQYAAAEKYLEDVLQSALTTSGL

SEQ ID NO: 324 - protein, 347 aa, Oryza sativa subsp. japonica
  misc_feature (1)..(347): Public GI no. 50942745
  misc_feature (1)..(347)
  Functional Homolog of CDNA ID no. 12323989at SEQ ID no. 311with e-value of 5E-70 and percent identity of 55.70
MDHAADHLDPAAPPSGPASSSAAVAEVNAWLASLAAEAGGAGGGGVGAPGGRGGVVGVGGGGAAPELSLGPEPTPRGVAYLRALAAASQARSRAAGIAAAGLRAQAAEYRAEAARLREALERAGLARDALSPPAAVSARAVAAVANLLAIRDTEMSRQKLSLGCIIATRNKQFDGGEHFVVASADLSLRRAEVEEKRDKVHKESKALLDYTRKAITKLTELKKMLEKFKNDVEKQQAEQMTDWQTKLVMMDSKERQYILQVSNYKAMLNRVGYTPEINHGVLMEMAEHKKDLERKTKPIADTLRSYQDLPPDKALAALAIEDKKRQYAAAEKYLEDVLQSALTTPGL

SEQ ID NO: 325 - protein, 292 aa, Triticum aestivum
  misc_feature (1)..(292): Ceres CLONE ID no. 938587
  misc_feature (1)..(292)
  Functional Homolog of CDNA ID no. 12323989at SEQ ID no. 311with e-value of 1.5E-10 and percent identity of 37.50
  misc_feature (22)..(22): Xaa is any aa, unknown, or other
  misc_feature (94)..(94): Xaa is any aa, unknown, or other
  misc_feature (229)..(229): Xaa is any aa, unknown, or other
MSTRGWLPWQRRAAEWEGADAXAEAAGSRCSELSLGPDPTPRGVSYLRALAAASQARSHAAGIAASGLRAQAAEYQAEAARLREALERAGLARXALPAPAASAARAVAAVANLLAIRDTEMSSFVVASADLWLRRAEVEEKRDKVHKESKALLDYTRKAITKLTELKRMLEKFKNDVEKQQVEQMADWQTKLVMMDSKERQYILQVSNYKAMLNRVGYTPEINHCVLMXMAEHKKDLERKTKPIADTLRSYQDLPPDKALAALAIEDKKRQYAAAEKYLEDVLQSALTTPGL

SEQ ID NO: 326 - protein, 310 aa, Zea mays
  misc_feature (1)..(310): Ceres CLONE ID no. 328171
  misc_feature (1)..(310)
  Functional Homolog of CDNA ID no. 12323989at SEQ ID no. 311with e-value of 1.2E-51 and percent identity of 49.80
MDHAAEHLDPTAPAPSSASSSAAVAEVNAWLASLAADVGGRGGGGGAAAELSLGPDPTPRGVAYLRALASASQGRSRAAGIAAAGLRAQAAEYRAEAARLREALERAGLARDALPPPAAAAARAVAAVANLLAIRDTEMSSFVVASADLSLRRAEVEEKRDKVHKESKALLDYTRKAINKLTELKKMLEKFKNDVEKQQVEQMTDWQTKLVMMDSKERQYILQVSNYKAMLNRVGYTPEINHGVLMEMAEHKKDLERKTKPIADTLRSYQDLPPDKALAALAIEDKKRQYAAAEKYLEDVLQSALTTSGL

SEQ ID NO: 327 - DNA, 980 bp, Arabidopsis thaliana
  misc_feature (1)..(980): Ceres CDNA ID no. 11407753
  misc_feature (1)..(980): Also Known As  Ceres SEEDLINE ME06120
  misc_feature (871)..(871): n is a, c, t, g, unknown, or other
atggggaaatacataagaaagagcaaaatcgacggagctggagctggagctggtggtggaggtggaggcggaggtggaggtgaatcctctattgctttaatggatgttgtttcaccttcttcctcttcttcacttggtgttttaactcgagctaaatctctagctcttcaacaacaacaacaacgctgtcttcttcaaaaaccctcttctccttcttcgttaccaccgacttctgcttctcctaatccaccgtcaaagcagaagatgaagaagaagcagcagcagatgaacgattgtggttcgtatcttcagctacggagtcgtcggcttcagaagaaaccaccaattgttgtgattcgttctactaaacggaggaaacagcaacggaggaatgagacatgcggaagaaaccctaaccctaggagtaatttggattcgattcgtggtgatgggtctaggtctgattctgtttctgaaagtgttgtctttggtaaagacaaggatttgatttctgaaatcaataaagatccaacctttggccaaaatttcttcgaccttgaagaagaacacactcaaagcttcaacaggaccacaagggaatccacaccatgcagtttgataagaaggcctgaaatcatgacaaccccgggatcgtctacaaagcttaacatttgtgtaagtgaaagcaaccagagagaagacagtttgtcacgcagccatcgtcgccgaccaactacacctgaaatggacgagtttttctcgggtgctgaagaagaacaacagaagcaattcattgagaagtacaactttgatcctgtgaacgaacaaccactaccaggacggtttgaatggacgaaggtagatgattagnaacaacaaaaaaatggggggttaatagttaatacagaatatattaacattttcctgctaattatcggtttgatcttattaccatcatccgttttcttaacttttttcac

SEQ ID NO: 328 - protein, 289 aa, Arabidopsis thaliana
  misc_feature (1)..(289): Ceres CDNA ID no. 11407753
  misc_feature (1)..(289): Also Known As  Ceres SEEDLINE ME06120
  misc_feature (239)..(288): Pfam Name: CDI Pfam Description: Cyclin-dependent kinase inhibitor
  misc_feature: Phenotype: WHOLE PLANT Useful for making bigger plants
  misc_feature: Phenotype: Serrate Margins Useful for making plants with increased biomass and foliage
  misc_feature: Phenotype: Serrate Margins Useful for making plants with increased biomass and foliage
MGKYIRKSKIDGAGAGAGGGGGGGGGGESSIALMDVVSPSSSSSLGVLTRAKSLALQQQQQRCLLQKPSSPSSLPPTSASPNPPSKQKMKKKQQQMNDCGSYLQLRSRRLQKKPPIVVIRSTKRRKQQRRNETCGRNPNPRSNLDSIRGDGSRSDSVSESVVFGKDKDLISEINKDPTFGQNFFDLEEEHTQSFNRTTRESTPCSLIRRPEIMTTPGSSTKLNICVSESNQREDSLSRSHRRRPTTPEMDEFFSGAEEEQQKQFIEKYNFDPVNEQPLPGRFEWTKVDD

SEQ ID NO: 329 - protein, 190 aa, Triticum aestivum
  misc_feature (1)..(190): Ceres CLONE ID no. 746644
  misc_feature (1)..(190)
  Functional Homolog of CDNA ID no. 11407753at SEQ ID no. 328with e-value of 6.5E-36 and percent identity of 55.88
MGKYMRKPKVSGEVAVMEVAAAPLGVRTRARALAMQRQPQGAAVAKDQGEYLELRSRKLEKLPPPPPAARRRAAAAERVEAEAEADEVSFGENVLESEAMGRGTRETTPCSLIRDSGTISTPGSTTRPSHSNSHRRVQAPARHIIPCSAEMNEFFSAAEQPQQQAFIDKYNFDPVNDCPLPGRYEWVKLD

SEQ ID NO: 330 - protein, 234 aa, Euphorbia esula
  misc_feature (1)..(234): Public GI no. 56126414
  misc_feature (1)..(234)
  Functional Homolog of CDNA ID no. 11407753at SEQ ID no. 328with e-value of 3.3E-38 and percent identity of 52.80
MRKVKTTGEVAVMDLSLGVRTRAKTLALQRQARLPPPSPPPPPPAHPTPPGSSGGYLQLRSRRLVKPPILVHDSKRQKPGQNSEAHNPNPNLDAGSIVRVGPTDSPTLGSRPNEDEFEGNKESDDLGIEASFGENVLDIEGRGRYSRESTPCSLIRDPETIRTPGSTTRPTNSTEPNRRIQNSTPRHIPTAHEMDQFFAKAELEQQRQFMENYNFDPVNEKPLPGRYEWEKLDP

SEQ ID NO: 331 - protein, 220 aa, Glycine max
  misc_feature (1)..(220): Ceres CLONE ID no. 1644686
  misc_feature (1)..(220)
  Functional Homolog of CDNA ID no. 11407753at SEQ ID no. 328with e-value of 4.4E-36 and percent identity of 50.56
MKKAKPKGELALVESTTSNTTTSYMGVRTRAKTLALQKSHAQQHELAATSDSYLQLRSRRLQKPPILVHSPKRPKHPNPKSPIPEPPRLGLASERDATLNHNKDNTLHENAEPQEASFGENVLDFEGRERSTRESTPCSLIRDSDTVRTPGSTTRPTCSAEAYRRTEHAARRQIPTSREMDEFFAEIEEAQQKKFIEKYNFDPVNEKPLSGRYEWEKLKP

SEQ ID NO: 332 - protein, 210 aa, Lycopersicon esculentum
  misc_feature (1)..(210): Public GI no. 23899378
  misc_feature (1)..(210)
  Functional Homolog of CDNA ID no. 11407753at SEQ ID no. 328with e-value of 3.9E-35 and percent identity of 47.46
MGKYIRKTRKTEDVSPLGVLTRAKALALNGGDGGSYLELRSRRLVKPFTVLEGRRQKNGVPKNPNLVNPNPNQQIPNVCVNSEEGKGVKEMENQKEKEKSCLGPEDSFGENLLEFEGRKRTTRESTPCSLIRDSDNIQTPGSSTRRTNANEANGRVPNSIQPTIPTDLEMEEFFTRAEKEQQRKFIEKYNFDPVNEKPLPGRYEWVKVNH

SEQ ID NO: 333 - protein, 232 aa, Zea mays
  misc_feature (1)..(232): Ceres CLONE ID no. 311199
  misc_feature (1)..(232)
  Functional Homolog of CDNA ID no. 11407753at SEQ ID no. 328with e-value of 4.6E-24 and percent identity of 46.58
  misc_feature (180)..(180): Xaa is any aa, unknown, or other
PRGRGSLARTGPADDQAMGKYMRKGKMSGEVAVMEVPGGALLGVRTRSRTLALQRAQRPLDKGDADDAAGQYLELRSRRLEKPHKDHQPLPLPPPAPAAKRGAGRKAASAAAAPHALAEDEVEVEVSFGENVLDLDAMERSTRETTPCSLIRNPEMISTPGSTTKSKTSNSTTSRRRMEXSVCRFIPSSLEMEEFFSAAEQQEQHNFREKYNFCPVNDCPLPGRYEWARLDC

SEQ ID NO: 334 - protein, 218 aa, Zea mays
  misc_feature (1)..(218): Ceres CLONE ID no. 359810
  misc_feature (1)..(218)
  Functional Homolog of CDNA ID no. 11407753at SEQ ID no. 328with e-value of 2.9E-23 and percent identity of 44.44
GPDDQAMGKYMRKGKVSGEVAVMEVPGGALLGVRTRSRTLALQRAQRPLDKGDAEDAAAEYLELRSRRLEKPHKEHPPPPAPATATKRGAGRKAVAAAAQHVLMEDEVEVSFGDNVLDLDTMERSTRETTPCSLIRNPEMISTPGSTTKSKTSSNSTTSRRRTEETPSCRFIPSSLEMEEFFSAAEQQEQHSFREKYNFCPVNDCPLPGRYEWARLDC

SEQ ID NO: 335 - DNA, 1299 bp, Populus balsamifera subsp. trichocarpa
  misc_feature (1)..(1299): Ceres GDNA ANNOT ID no. 1476453
atgggcaagtatatgaggaaggctaaaacgacaaatgatttaaccgtggtcgacttgagttgtggtgtccgtacccgagccaaaaccctagctctcaagaaacaacaagccctcagattgcatgcttcctctgcctctcctcctcccccctcgtctcccgccggctacctccagcttcgcagccgccgtcttgagaagaaaccacctccagttccatcattgcatcatggctccccgcgaaggcagcagcagagactgggtggtcagaacaataacaaattggggcagcaagaaagccctagccctattttgaaaccgagttcgcgggtggataaagattccgggtcgagtcaagagagagaagggggggagagtaaagaggttgaagagaataataacagcaatagtaaagacttgggttcttttggagataatgttttggacattgaaagtagagatagggttttttttgttgttgaaattccgagtaatgggctttcctgtttggttgataagttaatggaaggaaagaggggtaatcgaggatgctctaacagaaactctgatttgattcaaagcctaaagaatgtttctgtcttatttgcttcatgtaatgaggatgggatatctaaagtggttttctactccttccttgatcctttggatacatattcactgtgcccatgtcatttttatcttctttgtcacaggagcactagggaatccactccttgcaatttaacaagaggcacagaagacacaagaacccctggttctactactaagcctgctagcccaactgaaagtagccggagattacagaactcaatgcaaagacgcatcccaacaacccgtgaaatggatgagttctttggcccagctgaagaagagcagctaaggcaattcactgagaaatcttctgagaggggaagtgaagaagatgtagatttaggcttcaggcaattaggtcagtcgctctgggtagctcatttggagtctttagatgttttgaaagaatcttgtcatgtcatcaagttccacttttcacttcaaaattgtaatctcctgttcaaatttgtgcatcctgaggtaggtgaatggagttatgtaagaactttgcaaggtgcttttgtggaaggggactggaaatggagaaataagcttgattctactgtgttgctttttttatcttgtcatccgtctgaacgggaagatttggtgtcaacacttgacaataaggaagtcttgattgtattttccttcggggctgctaaaatggaggttgaaaagaatcattaa

SEQ ID NO: 336 - protein, 432 aa, Populus balsamifera subsp. trichocarpa
  misc_feature (1)..(432): Ceres GDNA ANNOT ID no. 1476453
  misc_feature (1)..(432)
  Functional Homolog of CDNA ID no. 11407753at SEQ ID no. 328with e-value of 2.2E-10 and percent identity of 40.00
MGKYMRKAKTTNDLTVVDLSCGVRTRAKTLALKKQQALRLHASSASPPPPSSPAGYLQLRSRRLEKKPPPVPSLHHGSPRRQQQRLGGQNNNKLGQQESPSPILKPSSRVDKDSGSSQEREGGESKEVEENNNSNSKDLGSFGDNVLDIESRDRVFFVVEIPSNGLSCLVDKLMEGKRGNRGCSNRNSDLIQSLKNVSVLFASCNEDGISKVVFYSFLDPLDTYSLCPCHFYLLCHRSTRESTPCNLTRGTEDTRTPGSTTKPASPTESSRRLQNSMQRRIPTTREMDEFFGPAEEEQLRQFTEKSSERGSEEDVDLGFRQLGQSLWVAHLESLDVLKESCHVIKFHFSLQNCNLLFKFVHPEVGEWSYVRTLQGAFVEGDWKWRNKLDSTVLLFLSCHPSEREDLVSTLDNKEVLIVFSFGAAKMEVEKNH

SEQ ID NO: 337 - protein, 223 aa, Medicago truncatula
  misc_feature (1)..(223): Public GI no. 70906129
  misc_feature (1)..(223)
  Functional Homolog of CDNA ID no. 11407753at SEQ ID no. 328with e-value of 2.1E-18 and percent identity of 38.46
MGKYMKKLKSKSESPSPNSTPTPSPSPSPTPITTNSPPPTTPNSSDGVRTRARTLALENSNNQNQNLSVSSDSYLQLRNRRLKRPLIRQHSAKRNKGHDGNPKSPIGDSIAEEKTVQKSPEPENAEFKENAEDTERSARETTPVHLIMRADVLRPPRPITRRTFPTEANPKTEQPTIPISREFEEFCAKHEAEQQREFMEKYNFDPVTEQPLPGRYEWEKVSP

SEQ ID NO: 338 - protein, 242 aa, Oryza sativa subsp. japonica
  misc_feature (1)..(242): Public GI no. 31432625
  misc_feature (1)..(242)
  Functional Homolog of CDNA ID no. 11407753at SEQ ID no. 328with e-value of 7.8E-21 and percent identity of 37.77
MGKYMRKAKVVVSGEVVAAAVMELAAAPLGVRTRARSLALQKRQGGEYLELRSRRLEKLPPPPPPPPRRRATAAAATADATAAESAEAEVSFGGENVLELEAMERIAPFVSLNCVKNTWVAPSPKYPRVGATCLQGTKGVPYERDEQVLRHFWNTRETTPCSLIRDPDTISTPGSTTRRSHSSSHCKVQTPVRHNIIPASAELEAFFAAEEQRQRQAFIDKYNFDPVNDCPLPGRFEWVKLD

SEQ ID NO: 339 - DNA, 1024 bp, Arabidopsis thaliana
  misc_feature (1)..(1024): Ceres CDNA ID no. 7100244
  misc_feature (1)..(1024): Also Known As  Ceres SEEDLINE ME06121
aatctctctttctttctctctgatgaaaagctaacggaaaatggggaaatacataagaaagagcaaaatcgacggagctggagctggagctggtggtggaggtggaggcggaggtggaggtgaatcctctattgctttaatggatgttgtttcaccttcttcctcttcttcacttggtgttttaactcgagctaaatctctagctcttcaacaacaacaacaacgctgtcttcttcaaaaaccctcttctccttcttcgttaccaccgacttctgcttctcctaatccaccgtcaaagcagaagatgaagaagaagcagcagcagatgaacgattgtggttcgtatcttcagctacggagtcgtcggcttcagaagaaaccaccaattgttgtgattcgttctactaaacggaggaaacagcaacggaggaatgagacatgcggaagaaaccctaaccctaggagtaatttggattcgattcgtggtgatgggtctaggtctgattctgtttctgaaagtgttgtctttggtaaagacaaggatttgatttctgaaatcaataaagatccaacctttggccaaaatttcttcgaccttgaagaagaacacactcaaagcttcaacaggaccacaagggaatccacaccatgcagtttgataagaaggcctgaaatcatgacaaccccgggatcgtctacaaagcttaacatttgtgtaagtgaaagcaaccagagagaagacagtttgtcacgcagccatcgtcgccgaccaactacacctgaaatggacgagtttttctcgggtgctgaagaagaacaacagaagcaattcattgagaagtatgtgtttcctcgtttcatctgttctgttcttttggttatgagtttccagtttgttctgttcttctcttttggtcttgtgtctctaatggtttctgtcaactctttcttcaggtacaactttgatcctgtgaacgaacaaccactaccaggacggtttgaatggacgaaggtagatgattag

SEQ ID NO: 340 - protein, 327 aa, Arabidopsis thaliana
  misc_feature (1)..(341): Ceres CDNA ID no. 7100244
  misc_feature (1)..(341): Also Known As  Ceres SEEDLINE ME06121
  misc_feature (239)..(268): Pfam Name: CDI Pfam Description: Cyclin-dependent kinase inhibitor
  misc_feature: Phenotype: Serrate Margins Useful for making plants with increased biomass and foliage
MGKYIRKSKIDGAGAGAGGGGGGGGGGESSIALMDVVSPSSSSSLGVLTRAKSLALQQQQQRCLLQKPSSPSSLPPTSASPNPPSKQKMKKKQQQMNDCGSYLQLRSRRLQKKPPIVVIRSTKRRKQQRRNETCGRNPNPRSNLDSIRGDGSRSDSVSESVVFGKDKDLISEINKDPTFGQNFFDLEEEHTQSFNRTTRESTPCSLIRRPEIMTTPGSSTKLNICVSESNQREDSLSRSHRRRPTTPEMDEFFSGAEEEQQKQFIEKYVFPRFICSVLLVMSFQFVLFFSFGLVSLMVSVNSFFRYNFDPVNEQPLPGRFEWTKVDD

SEQ ID NO: 341 - DNA, 1479 bp, Arabidopsis thaliana
  misc_feature (1)..(1479): Ceres CDNA ID no. 4927725
  misc_feature (1)..(1479): Also Known As  Ceres SEEDLINE ME06126
tagtttcgtcctccgtcaatctctctcgccgctttatccttgttacaaatcccatcgatcttttcggaatcttccctcattatgctcagccaccattaccagagctccattgtttcagttctccgttcaacgattatcggaattattcacaacactattagtatcaccgtcgccaaccgattttgattaccagctttggtgacgacagtcgtgattaaggaggttttggtaaatttcttcgttcctgtttgttttcaaagatggctgctttgaaaggttatggcttgtgttctatggactctgctcttcaattcccctgtcctaagctattcaatagctacaagagaaggagctcgaaatgggtctctcccaaagcagctgttgtacccaatttccatctcccaatgcgcagcttggaggttaaaaacaggacaaacacagacgacattaaagctctacgtgtgatcacagctatcaaaacaccgtatctacctgatggaagattcgaccttgaagcctacgatgacttggtcaacattcagatacaaaacggtgctgaaggtgtcattgttggtggtacaactggtgaaggacaactgatgagctgggacgaacacattatgcttataggccataccgttaactgttttggcggaagcatcaaagtcattggaaacactggaagcaattcgactagagaagcaatccacgcgactgaacaaggattcgcggttggaatgcatgctgctcttcatataaacccttactatggcaagacttctattgagggactgattgcacatttccagtctgttcttcatatgggaccgacgattatatacaatgtgcctggtcgaacagggcaagatataccgcctcgtgccatcttcaaactttctcagaatccgaatttagctggtgtgaaggaatgtgttgggaacaagcgagtcgaagagtacactgagaatggggttgttgtgtggagtgggaatgatgatgagtgtcatgattccagatgggattatggagcaacaggagttatatcagttactagtaatttagttccgggtttgatgaggaagttgatgtttgaaggtaggaattcatctttgaactcaaagcttctacctttgatggcttggctgttccacgagccaaacccgattggaatcaacactgctttggctcagcttggagtttcgaggccggtttttaggttaccatatgtaccattgccactgtctaagaggcttgagtttgtgaaactggtgaaggagattggacgagagcattttgtgggtgagaaagatgttcaggctcttgatgatgatgattttatccttatcggtcgatattagcatacttttttttttttaatttttggttcctttttgtttggtgttaatgaagaagagatggttctatcatttggttttatgtagctgatgaatgaatgaaaactcaaggaatgatttcatc

SEQ ID NO: 342 - protein, 365 aa, Arabidopsis thaliana
  misc_feature (1)..(365): Ceres CDNA ID no. 4927725
  misc_feature (1)..(365): Also Known As  Ceres SEEDLINE ME06126
  misc_feature (64)..(341): Pfam Name: DHDPS Pfam Description: Dihydrodipicolinate synthetase family
  misc_feature: Phenotype: Late Flowering Useful for delaying flowering time
  misc_feature: Phenotype: WHOLE PLANT Useful for making bigger plants
  misc_feature: Phenotype: Serrate Margins Useful for making plants with increased biomass and foliage
MAALKGYGLCSMDSALQFPCPKLFNSYKRRSSKWVSPKAAVVPNFHLPMRSLEVKNRTNTDDIKALRVITAIKTPYLPDGRFDLEAYDDLVNIQIQNGAEGVIVGGTTGEGQLMSWDEHIMLIGHTVNCFGGSIKVIGNTGSNSTREAIHATEQGFAVGMHAALHINPYYGKTSIEGLIAHFQSVLHMGPTIIYNVPGRTGQDIPPRAIFKLSQNPNLAGVKECVGNKRVEEYTENGVVVWSGNDDECHDSRWDYGATGVISVTSNLVPGLMRKLMFEGRNSSLNSKLLPLMAWLFHEPNPIGINTALAQLGVSRPVFRLPYVPLPLSKRLEFVKLVKEIGREHFVGEKDVQALDDDDFILIGRY

SEQ ID NO: 343 - protein, 317 aa, Arabidopsis thaliana
  misc_feature (1)..(317): Ceres CLONE ID no. 37907
  misc_feature (1)..(317)
  Functional Homolog of CDNA ID no. 4927725at SEQ ID no. 342with e-value of 1.6E-157 and percent identity of 90.22
MRSLEDKNRTNTDDIRSLRVITAIKTPYLPDGRFDLQAYDDLVNTQIENGAEGVIVGGTTGEGQLMSWDEHIMLIGHTVNCFGGRIKVIGNTGSNSTREAIHATEQGFAMGMHGALHINPYYGKTSIEGMNAHFQTVLHMGPTIIYNVPGRTCQDIPPQVIFKLSQNPNMAGVKECVGNNRVEEYTEKGIVVWSGNDDQCHDSRWDHGATGVISVTSNLVPGLMRKLMFEGRNSALNAKLLPLMDWLFQEPNPIGVNTALAQLGVARPVFRLPYVPLPLSKRIEFVKLVKEIGREHFVGDRDVQVLDDDDFILIGRY

SEQ ID NO: 344 - protein, 365 aa, Arabidopsis thaliana
  misc_feature (1)..(365): Public GI no. 20465357
  misc_feature (1)..(365)
  Functional Homolog of CDNA ID no. 4927725at SEQ ID no. 342with e-value of 4.5E-176 and percent identity of 87.67
MSALKNYGLISIDSALHFPRSNQLQSYKRRNAKWVSPIAAVVPNFHLPMRSLEDKNRTNTDDIRSLRVITAIKTPYLPDGRFDLQAYDDLVNTQIENGAEGVIVGGTTGEGQLMSWDEHIMLIGHTVNCFGGRIKVIGNTGSNSTREAIHATEQGFAMGMHGALHINPYYGKTSIEGMNAHFQTVLHMGPTIIYNVPGRTCQDIPPQVIFKLSQNPNMAGVKECVGNNRVEEYTEKGIVVWSGNDDQCHDSRWDHGATGVISVTSNLVPGLMRKLMFEGRNSALNAKLLPLMDWLFQEPNPIGVNTALAQLGVARPVFRLPYVPLPLSKRIEFVKLVKEIGREHFVGDRDVQVLDDDDFILIGRY

SEQ ID NO: 345 - protein, 364 aa, Arabidopsis thaliana
  misc_feature (1)..(364): Public GI no. 21593306
  misc_feature (1)..(364)
  Functional Homolog of CDNA ID no. 4927725at SEQ ID no. 342with e-value of 1.4E-174 and percent identity of 87.64
MSALKNYGLISIDSALHFPRSNQLQSYKRNAKWVSPIAAVVPNFHLPMRSLEDKNRTNTDDIRSLRVITAIKTPYLPDGRFDLQAYDDLVNTQIENGAEGVIVGGTTGEGQLMSWDEHIMLIGHTVNCFGGRIKVIGNTGSNSTREAIHATEQGFAMGMHGALHINPYYGKTSIEGMNAHFQTVLHMGPTIIYNVPGRTCQDIPPQVIFKLSQNPNMAGVKECVGNNRVEEYTEKGIVVWSGNDDQCHDSRWDHGATGVISVTSNLVPGLMRKLMFEGRNSALNAKLLPLMDWLFQEPNPIGVNTALAQLGVARPVFRLPYVPLPLSKRIEFVKLVKEIGREHFVGDRDVQVLDDDDFILIGRY

SEQ ID NO: 346 - protein, 364 aa, Arabidopsis thaliana
  misc_feature (1)..(364): Public GI no. 5139329
  misc_feature (1)..(364)
  Functional Homolog of CDNA ID no. 4927725at SEQ ID no. 342with e-value of 1.7E-174 and percent identity of 87.64
MSALKNYGLISIDSALHFPRSNQLQSYKRNAKWVSPIAAVVPNFHLPMRSLEDKNRTNTDDIRSLRVITAIKTPYLPDGRFDLQAYDDLVNTQIENGAEGVIVGGTTGEGQLMSWDEHIMLIGHTVNCFGGRIKVIGNTGSNSTREAIHATEQGFAMGMHGALHINPYYGKTSIEGMNAHFQTVLHMGPTIIYNVPGRTCQDIPPQVIFKLSQNPNMAGVKECVGNNRVEEYTEKGIVVWSGNDDQCHDSRWDHGATGVISVTSNLVPGLMRKLMFEGRNSALNEKLLPLMDWLFQEPNPIGVNTALAQLGVARPVFRLPYVPLPLSKRIEFVKLVKEIGREHFVGDRDVQVLDDDDFILIGRY

SEQ ID NO: 347 - protein, 359 aa, Nicotiana tabacum
  misc_feature (1)..(359): Public GI no. 1213069
  misc_feature (1)..(359)
  Functional Homolog of CDNA ID no. 4927725at SEQ ID no. 342with e-value of 2E-157 and percent identity of 84.62
MSSSIIGRCHFVADSIEAAGTKRRTTRWRSPRAAVIPSFHLPMRSNEVKNRTFADDIKALRLITAIKTPYLPDGRFDLEAYDTLVNLQIENGAEGVIVGGTTGEGQLMSWDEHIMLIGHTVNCFGGSIKVIGNTGSNSTREAIHATEQGFAVGMHAALHINPYYGKTSLEGLISHFESVLPMGPTIIYNVPSRTGQDIPPRVIQTMAKSPNLAGVKECVGNDRVEQYTSDGVVVWSGNDDECHVSRWDYGATGVISVTSNLVPGLMRELMFGGKNPALNSKLMPLMEWLFHEPNPIALNTALAQLGVVRPVFRLPYVPLTKAKREEFVKIVKEIGRENFIGERDVQILDDNDFILVGRY

SEQ ID NO: 348 - protein, 308 aa, Nicotiana sylvestris
  misc_feature (1)..(308): Public GI no. 14575543
  misc_feature (1)..(308)
  Functional Homolog of CDNA ID no. 4927725at SEQ ID no. 342with e-value of 1.4E-142 and percent identity of 84.42
TFADDIKALRLITAIKTPYLPDGRFDLEAYDTLVNLQIENGAEGVIVGGTTGEGQLMSWDEHIMLIGHTVNCFGGSIKVIGNTGSISTREAIHATEQGFAVGMHAALHINPYYGKTSLEGLISHFESVLPMGPTIIYNVPSRTGQDIPPRVIQTMAKSPNLAGVKECVGNDRVEQYTSNGIVVWSGNDDECHVSRWDYGATGVISVTSNLVPGLMRELMFGGKNLALNSKLMPLVEWLFHEPNPIALNTAFAQLGVVRPVFRLPYVPLTKAKREEFVKIVKDIGRENFIGERDVQVLDDNDFILVGRY

SEQ ID NO: 349 - DNA, 1278 bp, Populus balsamifera subsp. trichocarpa
  misc_feature (1)..(1278): Ceres GDNA ANNOT ID no. 1524384
atgaagaagctcatccctaaaacccctaaacaaacaccacataagcatactccttttgccacagcctccgctccttcacacaacgtctcctcttcttcttatctctgtcggaacctggcgtcatgtccgccctccaccgccgcggctccgccgtccttcaagccgccgccgccgccgccgccgccaccaccacgatcaccacccccatctcaactattgttaccatcgagctatagcgtgtgcttgagggagtctgctctccagcttccgcgccataattgcgttgataattacaagaggaggagtggaaaatggaggcctccccaagctgctgcaaaacctaatttgacatcagcagaggatatgaaatctcttagattgataacagccatcaaaaccccatatctgcctgatggtagatttgatcttgaagcgtatgatgcgttggtgaatatgcagattgctaacggcgctgaaggtgttgtagttggtggcacaactggtgaaggtcagctgatgagctgggatgaacacataatgcttattggccacaccgtcaactgttttggtagctcaatcaaggtgatcggaaacactggaagtaactctacaagggaagcgattcatgccacagagcaaggttttgcggtcggaatgcatgctgctcttcatatcaatccatactacggaaaaacctccgtggagggcatggtttctcattttgacagcgtgctccctatgggcccaactattatatacaatgtgcctggcaggactggccaagatatccccccacgcgttattcatactatagctcagagtccgaacttggcaggcgttaaggaatgtgctggtaatgaccgggttgaacagtatacagataaaggaattgtggtgtggagtgggaatgatgatcagtgccatgatgcaaggtggaaccatggggcaactggagtggtttctgttactagcaacttggttccgggtttaatgcgcagacttatgtttgaggggaagaatgctgaactaaattcaaaactcctgccccttatcgactggctatttcaggagccgaaccccattgcattaaacacagctcttgctcaacttggggttgctagaccagttttcagactgccatatgtgcctcttccttcggctcagagggtagaatttgtgaatttggttaagaaaattggccgggagaattttgtaggagaagaagacgttcaggttctcgaagacgatgacttcatcttgatagctcgtctgtgttag

SEQ ID NO: 350 - protein, 304 aa, Populus balsamifera subsp. trichocarpa
  misc_feature (1)..(304): Ceres GDNA ANNOT ID no. 1524384
  misc_feature (1)..(304)
  Functional Homolog of CDNA ID no. 4927725at SEQ ID no. 342with e-value of 1.4E-139 and percent identity of 82.78
MKSLRLITAIKTPYLPDGRFDLEAYDALVNMQIANGAEGVVVGGTTGEGQLMSWDEHIMLIGHTVNCFGSSIKVIGNTGSNSTREAIHATEQGFAVGMHAALHINPYYGKTSVEGMVSHFDSVLPMGPTIIYNVPGRTGQDIPPRVIHTIAQSPNLAGVKECAGNDRVEQYTDKGIVVWSGNDDQCHDARWNHGATGVVSVTSNLVPGLMRRLMFEGKNAELNSKLLPLIDWLFQEPNPIALNTALAQLGVARPVFRLPYVPLPSAQRVEFVNLVKKIGRENFVGEEDVQVLEDDDFILIARLC

SEQ ID NO: 351 - DNA, 1314 bp, Populus balsamifera subsp. trichocarpa
  misc_feature (1)..(1314): Ceres GDNA ANNOT ID no. 1470977
atgaagaagctcatccctaaaacccctaaacaaacaccacataagcatactccttttgccacagcctccgctccttcacacaacgtctcctcttcttcttatctctgtcggaacctggcgtcatgtccgccctccaccgccgcggctccgccgtccttcaagccgccgccgccgccgccgccgccaccaccacgatcaccacccccatctcaactattgttaccatcgagctatagcgtgtgcttgagggagtctgctctccagcttccgcgccataattgcgttgataattacaagaggaggagtggaaaatggaggcctccccaagctgctgcaaaacctaatttgcatcttccgatgcgcagctttgaagttaaaaacatgacatcagcagaggatatgaaatctcttagattgataacagccatcaaaaccccatatctgcctgatggtagatttgatcttgaagcgtatgatgcgttggtgaatatgcagattgctaacggcgctgaaggtgttgtagttggtggcacaactggtgaaggtcagctgatgagctgggatgaacacataatgcttattggccacaccgtcaactgttttggtagctcaatcaaggtgatcggaaacactggaagtaactctacaagggaagcgattcatgccacagagcaaggttttgcggtcggaatgcatgctgctcttcatatcaatccatactacggaaaaacctccgtggagggcatggtttctcattttgacagcgtgctccctatgggcccaactattatatacaatgtgcctggcaggactggccaagatatccccccacgcgttattcatactatagctcagagtccgaacttggcaggcgttaaggaatgtgctggtaatgaccgggttgaacagtatacagataaaggaattgtggtgtggagtgggaatgatgatcagtgccatgatgcaaggtggaaccatggggcaactggagtggtttctgttactagcaacttggttccgggtttaatgcgcagacttatgtttgaggggaagaatgctgaactaaattcaaaactcctgccccttatcgactggctatttcaggagccgaaccccattgcattaaacacagctcttgctcaacttggggttgctagaccagttttcagactgccatatgtgcctcttccttcggctcagagggtagaatttgtgaatttggttaagaaaattggccgggagaattttgtaggagaagaagacgttcaggttctcgaagacgatgacttcatcttgatagctcgtctgtgttag

SEQ ID NO: 352 - protein, 318 aa, Populus balsamifera subsp. trichocarpa
  misc_feature (1)..(318): Ceres GDNA ANNOT ID no. 1470977
  misc_feature (1)..(318)
  Functional Homolog of CDNA ID no. 4927725at SEQ ID no. 342with e-value of 1.5E-144 and percent identity of 81.96
MRSFEVKNMTSAEDMKSLRLITAIKTPYLPDGRFDLEAYDALVNMQIANGAEGVVVGGTTGEGQLMSWDEHIMLIGHTVNCFGSSIKVIGNTGSNSTREAIHATEQGFAVGMHAALHINPYYGKTSVEGMVSHFDSVLPMGPTIIYNVPGRTGQDIPPRVIHTIAQSPNLAGVKECAGNDRVEQYTDKGIVVWSGNDDQCHDARWNHGATGVVSVTSNLVPGLMRRLMFEGKNAELNSKLLPLIDWLFQEPNPIALNTALAQLGVARPVFRLPYVPLPSAQRVEFVNLVKKIGRENFVGEEDVQVLEDDDFILIARLC

SEQ ID NO: 353 - protein, 317 aa, Glycine max
  misc_feature (1)..(317): Ceres CLONE ID no. 1043166
  misc_feature (1)..(317)
  Functional Homolog of CDNA ID no. 4927725at SEQ ID no. 342with e-value of 6.6E-143 and percent identity of 81.07
MRSFELKNRTSPEDIKALRLITAIKTPYLPDGRFDLEAYDDLVNMQIGQGAEGIIVGGTTGEGQLMSWEEHIMLIAHTVNCFGGKIKVIGNTGSNSTREAIHATEQGFAVGMHAALHINPYYGKTSLDGMLAHFQSVLSMGPTIIYNVPARTGQDIPPHVIQTLAESANLAGVKECVGNDRIKQYTDDGIVVWSGNDDQCHDARWGYGATGVISVVSNLVPGLMRELMFGGVNPTLNSKLLPLIDWLFHMPNPIGLNTALAQLGVVRPVFRLPFVPLPVDKRIEFANLVKEIGREHFVGNKDVEVLDDDDFFLVSRY

SEQ ID NO: 354 - DNA, 1678 bp, Arabidopsis thaliana
  misc_feature (1)..(1678): Ceres CDNA ID no. 11014624
  misc_feature (1)..(1678): Also Known As  Ceres SEEDLINE ME06133
atggcctcattctctcttccccactccgccacctactttccttcccactctgaaacctcacttaaacctcactccgccgcttccttcaccgtccgttgcacctccgcctctcccgccgttcctccacagactccacagaaaccccgtcgttcacccgatgagaacattcgagacgaagctcgtcgccgtcctcatcaactccaaaacctctccgcacgttacgtccctttcaacgctccaccttcttcaacagaatcctactccctcgacgagatcgtctaccgttcacaatccggtgctctcctcgacgtccagcatgatttcgccgccttgaaacgctacgacggagaattctggcgtaaccttttcgattctcgcgtcggtaaaacaaattggccgtacggatcaggcgtgtggtcgaagaaagagtgggtactccccgagatcgacgatgacgacatcgtctctgcttttgaaggaaactcaaatctcttctgggctgagagatttggtaaacagtatctgcaaatgaacgatctttgggtgaaacattgtggaatcagccacactggctcctttaaagatctgggcatgagtgttctcgtttctcaggtgaatcgtctccggaaaatgaacaaaccagtcatcggagttggttgcgcttctactggagatacctccgctgctctctctgcttactgtgcttccgctggaatcccctcgattgtcttcttacctgcggataaaatctccatggctcagcttgtgcagccgattgcaaacggagcgtttgtgcttagtattgacactgattttgacggatgtatgcatttgatcagagaagttacggcggagcttcctatttacttggcgaactctctcaacagcctccgtctcgaaggtcaaaagacggcggcgattgagattctgcagcagtttaattggcaagttcctgattgggtcattgttcctggaggcaatcttggtaacatctatgcgttttacaaagggtttcatatgtgtaaagagttaggtcttgttgatcgtatccctaggcttgtttgtgctcaagctgctaatgcaaatccactttacttgcattacaaatctgggtttaaagaagatttcaatccattgaaagcaaacactacatttgcttctgctattcagattggtgaccctgtttcgattgatagagctgtgtatgcgttgaagaaatctaatgggattgttgaggaagctacagaggaagagttgatggatgcaacagctcttgctgattctactggtatgtttatatgtccacatactggtgttgcattgacggcgttgatgaagctgagaaagtcaggagttattggagcgaatgatcggactgtggtggtgagtacagctcatggattgaagtttacacaaagtaagattgattatcattctaagaacataaaggagatggcttgtagattggcgaatccaccagtgaaggttaaggcaaagtttggttcagttatggatgttctcaaggagtatttgaagagcaatgataaataagctttgtgtgtttgtttcttctaaagctcttcacgtcctatgatgatattgttggctttgttattagaggaagtaatgaaatttcgtttctttggacttgtggaataaaacgactggttggttccgt

SEQ ID NO: 355 - protein, 516 aa, Arabidopsis thaliana
  misc_feature (1)..(516): Ceres CDNA ID no. 11014624
  misc_feature (1)..(516): Also Known As  Ceres SEEDLINE ME06133
  misc_feature (155)..(466): Pfam Name: PALP Pfam Description: Pyridoxal-phosphate dependent enzyme
MASFSLPHSATYFPSHSETSLKPHSAASFTVRCTSASPAVPPQTPQKPRRSPDENIRDEARRRPHQLQNLSARYVPFNAPPSSTESYSLDEIVYRSQSGALLDVQHDFAALKRYDGEFWRNLFDSRVGKTNWPYGSGVWSKKEWVLPEIDDDDIVSAFEGNSNLFWAERFGKQYLQMNDLWVKHCGISHTGSFKDLGMSVLVSQVNRLRKMNKPVIGVGCASTGDTSAALSAYCASAGIPSIVFLPADKISMAQLVQPIANGAFVLSIDTDFDGCMHLIREVTAELPIYLANSLNSLRLEGQKTAAIEILQQFNWQVPDWVIVPGGNLGNIYAFYKGFHMCKELGLVDRIPRLVCAQAANANPLYLHYKSGFKEDFNPLKANTTFASAIQIGDPVSIDRAVYALKKSNGIVEEATEEELMDATALADSTGMFICPHTGVALTALMKLRKSGVIGANDRTVVVSTAHGLKFTQSKIDYHSKNIKEMACRLANPPVKVKAKFGSVMDVLKEYLKSNDK

SEQ ID NO: 356 - protein, 519 aa, Solanum tuberosum
  misc_feature (1)..(519): Public GI no. 8439547
  misc_feature (1)..(519)
  Functional Homolog of CDNA ID no. 11014624at SEQ ID no. 355with e-value of 7.7E-220 and percent identity of 83.67
MAASCMLRSSFISPGLPQLHHQSTSKPNNGIHFFTPIKATATNDAISQQKHRRPADENIREEARRHCSSHNFSARYVPFNAGPNSDEWYSLDEIVYRSRSGGLLDVQHDMDALKKFDGQYWRSLFDSRVGKTTWPYGSGVWSKKEWVLPEIDSDDIVSAFEGNSNLFWAERFGKQFLGMTDLWVKHCGISHTGSFKDLGMTVLVSQVNRLRKMHKPVVGVGCASTGDTSAALSAYCASAGIPSIVFLPANKISMAQLVQPIANGAFVLSIDTDFDGCMQLIREVTAELPIYLANSLNSLRLEGQKTAAIEILQQFDWEVPEWVIVPGGNLGNIYAFYKGFQMCKELGLVDRIPRLVCAQAANANPLYLHYKSGWKDFKPVKANTTFASAIQIGDPVSIDRAVFALQQCNGIVEEATEEELMDAMAQADSTGMFICPHTGVALTALFKLRNSGVIAPTDRTVVVSTAHGLKFTQSKIDYHSKEIKDMECRFANPPVEVKADFGSVMDVLKSYLLSQNSKL

SEQ ID NO: 357 - protein, 526 aa, Arabidopsis thaliana
  misc_feature (1)..(526): Ceres CLONE ID no. 1199827
  misc_feature (1)..(526)
  Functional Homolog of CDNA ID no. 11014624at SEQ ID no. 355with e-value of 1.4E-218 and percent identity of 82.86
MASSCLFNASVSSLNPKQDPIRRHRSTSLLRHRPVVISCTADGNNIKAPIETAVKPPHRTEDNIRDEARRNRSNAVNPFSAKYVPFNAAPGSTESYSLDEIVYRSRSGGLLDVEHDMEALKRFDGAYWRDLFDSRVGKSTWPYGSGVWSKKEWVLPEIDDDDIVSAFEGNSNLFWAERFGKQFLGMNDLWVKHCGISHTGSFKDLGMTVLVSQVNRLRKMKRPVVGVGCASTGDTSAALSAYCASAGIPSIVFLPANKISMAQLVQPIANGAFVLSIDTDFDGCMKLIREITAELPIYLANSLNSLRLEGQKTAAIEILQQFDWQVPDWVIVPGGNLGNIYAFYKGFKMCQELGLVDRIPRMVCAQAANANPLYLHYKSGWKDFKPMTASTTFASAIQIGDPVSIDRAVYALKKCNGIVEEATEEELMDAMAQADSTGMFICPHTGVALTALFKLRNQGVIAPTDRTVVVSTAHGLKFTQSKIDYHSNAIPDMACRFSNPPVDVKADFGAVMDVLKSYLGSNTLTS

SEQ ID NO: 358 - protein, 525 aa, Arabidopsis thaliana
  misc_feature (1)..(525): Public GI no. 1448917
  misc_feature (1)..(525)
  Functional Homolog of CDNA ID no. 11014624at SEQ ID no. 355with e-value of 1.4E-218 and percent identity of 82.86
LSSCLFNASVSSLNPKQDPIRRHRSTSLLRHRPVVISCTADGNNIKAPIETAVKPPHRTEDNIRDEARRNRSNAVNPFSAKYVPFNAAPGSTESYSLDEIVYRSRSGGLLDVEHDMEALKRFDGAYWRDLFDSRVGKSTWPYGSGVWSKKEWVLPEIDDDDIVSAFEGNSNLFWAERFGKQFLGMNDLWVKHCGISHTGSFKDLGMTVLVSQVNRLRKMKRPVVGVGCASTGDTSAALSAYCASAGIPSIVFLPANKISMAQLVQPIANGAFVLSIDTDFDGCMKLIREITAELPIYLANSLNSLRLEGQKTAAIEILQQFDWQVPDWVIVPGGNLGNIYAFYKGFKMCQELGLVDRIPRMVCAQAANANPLYLHYKSGWKDFKPMTASTTFASAIQIGDPVSIDRAVYALKKCNGIVEEATEEELMDAMAQADSTGMFICPHTGVALTALFKLRNQGVIAPTDRTVVVSTAHGLKFTQSKIDYHSNAIPDMACRFSNPPVDVKADFGAVMDVLKSYLGSNTLTS

SEQ ID NO: 359 - protein, 526 aa, Arabidopsis thaliana; identical to SEQ ID NO: 357
  misc_feature (1)..(526): Public GI no. 4914408
  misc_feature (1)..(526)
  Functional Homolog of CDNA ID no. 11014624at SEQ ID no. 355with e-value of 1.4E-218 and percent identity of 82.86

SEQ ID NO: 360 - protein, 535 aa, Arabidopsis thaliana
  misc_feature (1)..(535): Public GI no. 42573081
  misc_feature (1)..(535)
  Functional Homolog of CDNA ID no. 11014624at SEQ ID no. 355with e-value of 1.4E-218 and percent identity of 82.86
MASSCLFNASVSSLNPKQDPIRRHRSTSLLRHRPVVISCTADGNNIKAPIETAVKPPHRTEDNIRDEARRNRSNAVNPFSAKYVPFNAAPGSTESYSLDEIVYRSRSGGLLDVEHDMEALKRFDGAYWRDLFDSRVGKSTWPYGSGVWSKKEWVLPEIDDDDIVSAFEGNSNLFWAERFGKQFLGMNDLWVKHCGISHTGSFKDLGMTVLVSQVNRLRKMKRPVVGVGCASTGDTSAALSAYCASAGIPSIVFLPANKISMAQLVQPIANGAFVLSIDTDFDGCMKLIREITAELPIYLANSLNSLRLEGQKTAAIEILQQFDWQVPDWVIVPGGNLGNIYAFYKGFKMCQELGLVDRIPRMVCAQAANANPLYLHYKSGWKDFKPMTASTTFASAIQIGDPVSIDRAVYALKKCNGIVEEATEEELMDAMAQADSTGMFICPHTGVALTALFKLRNQGVIAPTDRTVVVSTAHGLKFTQSKIDYHSNAIPDMACRFSNPPVDVKADFGAVMDVLKSYLGSNTLTLISSLQCPKA

SEQ ID NO: 361 - protein, 515 aa, Glycine max
  misc_feature (1)..(515): Ceres CLONE ID no. 578495
  misc_feature (1)..(515)
  Functional Homolog of CDNA ID no. 11014624at SEQ ID no. 355with e-value of 9.5E-206 and percent identity of 78.70
MLSSLLNPSFTTTLPIHSILIPNNRRASTVVSCTSSHLTTNNHSHVSSPPNIKDEARRRPAAENDFTAKYVPFNAGFDSPETYSLDEIVYRSRSGGLLDVQHDMEALGRFDGAYWRALFDSRVGKTTWPYGSGVWSKKEWVLPEIDPDDIVSAFEGNSNLFWAERFGKQFVGMNDLWVKHCGISHTGSFKDLGMTVLVSQVNRLRKMNRPVVGVGCASTGDTSAALSAYCASAGIPSIVFLPANKISTAQLIQPVSNGSLVLSINTDFDGCMKLIREITAELPIYLANSLNSLRLEGQKTAAIEILQQFNWEVPDWVIVPGGNLGNIYAFYKGFKMCKELGLVERIPRLVCAQAANANPLYLHYKNGFKDFNAVKAETTFASAIQIGDPVSIDRAVHALRNTEGIVEEATEEELMDAMVQADSTGMFICPHTGVALAALIKLRNRGVIGAGERVVVVSTAHGLKFAQSKIDYHSGLIPGMGRYANPLVSVKADFGSVMDVLKDFLHNKSPDFNKS

SEQ ID NO: 362 - protein, 527 aa, Zea mays
  misc_feature (1)..(527): Ceres CLONE ID no. 280346
  misc_feature (1)..(527)
  Functional Homolog of CDNA ID no. 11014624at SEQ ID no. 355with e-value of 5.3E-196 and percent identity of 74.65
MATFTAASSLSLLFSHPHSHSRQPSAQGPTASSHLHLHPRASRARCASSDTTATKHRRPAEENIREEAARLRGPAQGFSAWYEPFPPAPGGDPNERYSLDEVVYRSSSGGLLDVRHDMEALARYPGSYWRDLFDSRVGRTAWPYGSGVWSKKEFVLPEIDSDHIVSLFEGNSNLFWAERLGREHLGGMNDLWVKHCGISHTGSFKDLGMTVLVSQVNRLRRAPLSRPIAGVGCASTGDTSAALSAYCAAAGIPAIVFLPADRISLQQLIQPIANGATVLSLDTDFDGCMRLIREVTAELPIYLANSLNPLRLEGQKTAAIEILQQFNWQVPDWVIVPGGNLGNIYAFYKGFEMCRVLGLVDRVPRLVCAQAANANPLYRYYKSGWTEFEPQTAETTFASAIQIGDPVSVDRAVVALKATDGIVEEATEEELMDATALADRTGMFACPHTGVALAALFKLQGQRIIGPNDRTVVVSTAHGLKFTQSKIDYHDKNIKDMVCQYANPPISVKADFGSVMDVLQKNLNGKI

SEQ ID NO: 363 - protein, 525 aa, Oryza sativa subsp. japonica
  misc_feature (1)..(525): Public GI no. 34911416
  misc_feature (1)..(525)
  Functional Homolog of CDNA ID no. 11014624at SEQ ID no. 355with e-value of 2.7E-192 and percent identity of 74.35
MATATASSLSLLFAHPHSSNPRPFAGGPHLRRPLRAAPHRARCASDAATTATRHRRPAEENIREEAARLRGPGNDFSAWYVPFPPTPEDDPDERYSLDEVVYRSSSGGLLDVCHDMEALARFPGSYWRDLFDSRVGRTAWPYGSGVWSKKEFVLPEIDSDHIVSLFEGNSNLFWAERLGREHLGGMTDLWVKHCGISHTGSFKDLGMTVLVSQVNRLRRAPLSRPINGVGCASTGDTSAALSAYCAAAGIPAIVFLPADRISLQQLIQPIANGATVLSLDTDFDGCMRLIREVTAELPIYLANSLNSLRLEGQKTAAIEILQQFDWQVPDWVIVPGGNLGNIYAFYKGFEMCRVLGLVDRVPRLVCAQAANANPLYRFYKSGWTDFQPRVAETTFASAIQIGDPVSVDRAVVALKATDGIVEEATEEELMDAMSLADRTGMFACPHTGVALAALFKLRDQRIIGPNDRTVVVSTAHGLKFTQSKIDYHDRNIKDMLCQYANPPINVKADFASVMDVLQNKLNGKI

SEQ ID NO: 364 - DNA, 1623 bp, Arabidopsis thaliana
  misc_feature (1)..(1623): Ceres CDNA ID no. 4987967
  misc_feature (1)..(1623): Also Known As  Ceres SEEDLINE ME06186
attttcgggtatcaaagccacaaaaccctgagaatggcggcagctactcaatttctctcccaaccttcgtctctcaatccacaccaactgaagaaccaaacctcacaacgctccagaagcatccctgtcttgtctcttaaatccacattgaagccacttaaacgcctctccgtgaaagccgccgtcgtttctcaaaactcgtccaaaaccgtgacgaagttcgatcactgtttcaagaaatcatcagatgggtttctctattgtgaaggaactaaagttgaggatatcatggagtcagtggagagaagacccttttacttatatagcaaacctcagatcactagaaacctcgaggcttataaagaagcattggaaggagtgagctctgtgattggttacgctatcaaagctaataacaatcttaaaattttggagcatttgagaagtttaggctgtggtgctgtgctcgttagtggaaatgagcttagacttgctcttcgtgctggtttcgatcccacaaagtgcattttcaatggaaatggcaagtctttggaagatttagttctagctgctcaagaaggtgttttcgttaatgtcgatagtgagtttgacttgaataacattgtggaagcttcaagaatttctggtaagcaggtcaatgtactgctgcgtatcaatcctgatgttgatcctcaggtgcatccatatgttgctactgggaacaagaactcaaagtttggtatcaggaacgagaagcttcaatggtttctggatcaggtcaaggcacatcccaaagagctgaagcttgttggagctcattgccatctaggctctaccattactaaggtggatatattcagagatgcggcagttctcatgatagaatacattgacgagatccggcgtcaaggttttgaagttagttacttgaacattggtggtggtttagggattgattattaccatgccggcgctgtccttcccacacccatggatctcatcaacactgtaagagagcttgttctttcacgagacctgaatctaataatcgagccagggagatctctgattgcaaacacttgctgtttcgtcaaccatgtaactggtgtgaagacgaatggaactaagaacttcatagtcattgatggaagtatggctgagcttatccgtcccagtctttatgatgcttatcagcacattgagttggtctctcctccaccggctgaagcagaggttaccaaattcgacgtagtgggtcctgtctgtgaatctgctgatttcctgggcaaagacagagagcttcccactcctccacagggagctggtctggtggttcatgacgctggtgcatactgtatgagcatggcttccacttacaatctcaagatgcgtcctccggaatactgggttgaagaagatgggtcgatcactaagataaggcatgctgagacattcgatgaccatttgcgtttctttgaaggtctatgaactcttagatttactcatcattgttgcttttttgattgaattgtatgattattcggaatcaggaccataatgatattgctgttttagattttcacattatgtgctttgattcaaagtcaatgaagtgatcatatg

SEQ ID NO: 365 - protein, 484 aa, Arabidopsis thaliana
  misc_feature (1)..(484): Ceres CDNA ID no. 4987967
  misc_feature (1)..(484): Also Known As  Ceres SEEDLINE ME06186
  misc_feature (351)..(460): Pfam Name: Orn_DAP_Arg_deC Pfam Description: Pyridoxal-dependent decarboxylase, C-terminal sheet domain
  misc_feature (98)..(348): Pfam Name: Orn_Arg_deC_N Pfam Description: Pyridoxal-dependent decarboxylase, pyridoxal binding domain
  misc_feature: Phenotype: Early Flowering Useful for accelerating flowering time
MAAATQFLSQPSSLNPHQLKNQTSQRSRSIPVLSLKSTLKPLKRLSVKAAVVSQNSSKTVTKFDHCFKKSSDGFLYCEGTKVEDIMESVERRPFYLYSKPQITRNLEAYKEALEGVSSVIGYAIKANNNLKILEHLRSLGCGAVLVSGNELRLALRAGFDPTKCIFNGNGKSLEDLVLAAQEGVFVNVDSEFDLNNIVEASRISGKQVNVLLRINPDVDPQVHPYVATGNKNSKFGIRNEKLQWFLDQVKAHPKELKLVGAHCHLGSTITKVDIFRDAAVLMIEYIDEIRRQGFEVSYLNIGGGLGIDYYHAGAVLPTPMDLINTVRELVLSRDLNLIIEPGRSLIANTCCFVNHVTGVKTNGTKNFIVIDGSMAELIRPSLYDAYQHIELVSPPPAEAEVTKFDVVGPVCESADFLGKDRELPTPPQGAGLVVHDAGAYCMSMASTYNLKMRPPEYWVEEDGSITKIRHAETFDDHLRFFEGL

SEQ ID NO: 366 - DNA, 1509 bp, Populus balsamifera subsp. trichocarpa
  misc_feature (1)..(1509): Ceres GDNA ANNOT ID no. 1460794
atggcggctgctactaatttctctcactcgcccttcatttctaaaaccctaactcactctctaaaccataacccacttcccaaaaacccaactttgcctttcaaactctcaaaaagctactctctcaaggcagttatatcccagcaaaaccctgctacagccacaacacagaaaacgcagtttaagcattgttttacaaaatcccaagatggatttctctactgtgagagccttaaggttcaggagattatggagagtgttgagaagagaccattttatttgtacagtaagccacagattactagaaatgttgaggcttataaggatgctttacaaggattgagttctatcattgggtatgctattaaggctaataataacttgaagattttggagcatttgagagggttgggttgtggtgctgttttggttagtggtaacgagcttaggctggctctccgtgccggtttcgatcccacgaggtgtatttttaatggaaatgggaagctgttggatgatttggttttagctgctcaagaaggtgtttttgttaacgtggatagtgaattcgatttggaaaatattgtggctgctgctagaattgctggcaagaaggttaatgttctacttcggatcaacccagatgttgaccctcagaaaaggataatgcttgctgatttgctcatatattttaaaactggcaccacaaaagtcatggtccatccttatgttgctactgggaataagaactctaaatttggtattagaaatgagaagctgcaatggtttctggatgctgtgaaggcacaccctaatgagctgaagcttgtgggggcccattgccatcttggatcaaccatcaccaaggtggacatattcagagatgctgcagctcttatggttaactacattgatgaaatccgagcccagggatttgaagttgattacttgaacattggaggtggtttgggtatagattattatcattctggtgctgtccttcctactccaagagatctcattgacactgttcgtgaactggtgctctcacgagatctcaatctcattattgaacctgggagatctctcattgcaaatacttgctgcctggtgaacagggtcactggggttaaaactaatggaacaaaaaattttgttgtgatagatggaagcatggctgaacttatccgccctagtctttatgatgcttatcaacacatagagcttgtttctcctgcgtcacccagtgcggaagtttcaacttttgatgtggttggtcctgtctgtgagtcagcagatttcctgggaaaggatagagaacttccaactcctgctaagggagctggtttggttgttcatgatgcaggtgcttactgtatgagcatggcgtcgacatacaatctcaagatgcgccctcctgagtactgggttgaagatgatggatcagtgtccaaaattcgacagggagagacatttgaagaccatattcggttcttcgagggtctttga

SEQ ID NO: 367 - protein, 419 aa, Populus balsamifera subsp. trichocarpa
  misc_feature (1)..(419): Ceres GDNA ANNOT ID no. 1460794
  misc_feature (1)..(419)
  Functional Homolog of CDNA ID no. 4987967at SEQ ID no. 365with e-value of 4.8E-189 and percent identity of 89.25
MESVEKRPFYLYSKPQITRNVEAYKDALQGLSSIIGYAIKANNNLKILEHLRGLGCGAVLVSGNELRLALRAGFDPTRCIFNGNGKLLDDLVLAAQEGVFVNVDSEFDLENIVAAARIAGKKVNVLLRINPDVDPQKRIMLADLLIYFKTGTTKVMVHPYVATGNKNSKFGIRNEKLQWFLDAVKAHPNELKLVGAHCHLGSTITKVDIFRDAAALMVNYIDEIRAQGFEVDYLNIGGGLGIDYYHSGAVLPTPRDLIDTVRELVLSRDLNLIIEPGRSLIANTCCLVNRVTGVKTNGTKNFVVIDGSMAELIRPSLYDAYQHIELVSPASPSAEVSTFDVVGPVCESADFLGKDRELPTPAKGAGLVVHDAGAYCMSMASTYNLKMRPPEYWVEDDGSVSKIRQGETFEDHIRFFEGL

SEQ ID NO: 368 - DNA, 1464 bp, Populus balsamifera subsp. trichocarpa
  misc_feature (1)..(1464): Ceres GDNA ANNOT ID no. 1450365
atggcgactgctacagatctctctcagtcacgcttcatttccaaaaccctaactcactccctaaatcaaaacctattttccaaaaaatcaattttgccctttaaactaacaaaaaaaaactatctcaaacccctttctctcaaggcagttatttcccaacaaaaccccgctacaaccacagcacaggaaaccacacagtttaagcattgtttcaccaaatccaaagatgggtttctctgctgtgagaaccttaaggttcaggagattatggagaatgttgagaagagaccgttttatttgtatagtaagccacagattactagaaatgttgaggcttataaggatgccttacaaggactgaattctattattggttatgctattaaggctaataataatttgaagattttggagcatttgagagggttgggttgtggtgctgttttggtaagtggtaacgagcttaggttggctcttcgggccggtttcgatcccacaaggtgtatttttaatggaaatgggaagctgctggacgatttggttctggctgctcaagaaggtgtttttgttaacgtggatagtgaatttgatttggaaaatattgtggcagctgctagaattgctggcaagaaggttaatgttctactccggatcaacccagatgttgaccctcaggttcatccttatgttgctacagggaacaagaactctaaatttggtattagaaatgagaagctgcaatggtttctggatgctgtaaaggcacaccgtgatgagctgaagctcgtgggggcccattgccatctaggatcaaccatcaccaaggtggacatattcagggatgctgcagttctcatggttaactacattgatgaaatcagagctcagggctttgaagttgattacttaaacattggaggtggtttgggtatagattattatcattctggtgcagtccttcctactccaagagatctcattgacactgttcgtgaactggttctctcacgagatctcaatctcatcattgaacctgggagatcgctcattgcaaatacttgctgcttggtgaatagggtcactggggttaaaactaatggaacaaaaaattttgttgtgatagatggcagcatggctgaacttatccgtcctagtctttatgatgcttatcaacacatagagcttgtttctcctgcatcacccaaggctgaagtttcaacttttgatgtggttggtcctgtctgtgagtccgcagatttcctgggaaaggatagagaacttccaactccagctaagggagctggtttggttgttcatgatgcaggtgcttactgcatgagcatggcatcgacatacaatctcaagatgcgccctcctgagtactgggttgaagatggaacagtgtccaaaattcggcatggggagacattcgaagaccatattcggttctttgagggtctttga

SEQ ID NO: 369 - protein, 398 aa, Populus balsamifera subsp. trichocarpa
  misc_feature (1)..(398): Ceres GDNA ANNOT ID no. 1450365
  misc_feature (1)..(398)
  Functional Homolog of CDNA ID no. 4987967at SEQ ID no. 365with e-value of 3.2E-192 and percent identity of 88.97
MENVEKRPFYLYSKPQITRNVEAYKDALQGLNSIIGYAIKANNNLKILEHLRGLGCGAVLVSGNELRLALRAGFDPTRCIFNGNGKLLDDLVLAAQEGVFVNVDSEFDLENIVAAARIAGKKVNVLLRINPDVDPQVHPYVATGNKNSKFGIRNEKLQWFLDAVKAHRDELKLVGAHCHLGSTITKVDIFRDAAVLMVNYIDEIRAQGFEVDYLNIGGGLGIDYYHSGAVLPTPRDLIDTVRELVLSRDLNLIIEPGRSLIANTCCLVNRVTGVKTNGTKNFVVIDGSMAELIRPSLYDAYQHIELVSPASPKAEVSTFDVVGPVCESADFLGKDRELPTPAKGAGLVVHDAGAYCMSMASTYNLKMRPPEYWVEDGTVSKIRHGETFEDHIRFFEGL

SEQ ID NO: 370 - protein, 488 aa, Glycine max
  misc_feature (1)..(488): Ceres CLONE ID no. 593648
  misc_feature (1)..(488)
  Functional Homolog of CDNA ID no. 4987967at SEQ ID no. 365with e-value of 5.8E-206 and percent identity of 82.38
MAGSHLLSHSPSLPKTYNYSLNQNPLSQNLFFPPLKFKSTTKPRVLRAVLSQNAAKTAVEDTKNAHFQHCFTKSEDGYLYCEGLKVHDIMESVERRPFYLYSKPQITRNVEAYKDALEGLSSIIGYAIKANNNLKILEHLRHLGCGAVLVSGNELRLALRAGFDPTRCIFNGNGKILEDLVLAAQEGVFVNIDSEFDLENITEAAKRAGKKVNVLLRINPDVDPQVHPYVATGNKNSKFGIRNEKLQWFLDAVKELPNELKLVGAHCHLGSTITKVDIFRDAATIMINYIDQIRDQGFEVDYLNIGGGLGIDYYHSGAILPTPRDLIDTVRDLVISRGLNLIIEPGRSLIANTCCLVNRVTGVKSNGSKNFIVIDGSMAELIRPSLYDAYQHIELVSPAPSNAETTTFDVVGPVCESADFLGKGRELPTPAKGTGLVVHDAGAYCMSMASTYNLKMRPPEYWVEDDGSVSKIRHGETFEDHIRFFEGL

SEQ ID NO: 371 - protein, 439 aa, Zea mays
  misc_feature (1)..(439): Ceres CLONE ID no. 237870
  misc_feature (1)..(439)
  Functional Homolog of CDNA ID no. 4987967at SEQ ID no. 365with e-value of 3.8E-186 and percent identity of 79.52
MASPSPPPQPAAAGVPKHCFRRGADGYLYCEGVRVEDAMAAAERSPFYLYSKLQILRNFAAYRDALQGLRSIVGYAVKANNNLPVLRVLRELGCGAVLVSGNELRLALQAGFDPARCIFNGNGKTLEDLKLAAESGVFVNVDSEFDLENIVRAARATGKKVPVLLRINPDVDPQVHPYVATGNKTSKFGIRNEKLQWFLNSIKSYSNEIKLVGVHCHLGSTITKVDIFRDAAVLMVNYVDEIRAQGFKLEYLNIGGGLGIDYHHTDAVLPTPMDLINTVRELVLSQDLTLIIEPGRSLIANTCCFVNRVTGVKSNGTKNFIVVDGSMAELIRPSLYGAYQHIELVSPPTPGAEVATFDIVGPVCESADFLGKDRELPTPDEGAGLVVHDAGAYCMSMASTYNLKLRPPEYWVEEDGSIVKIRHEEKLDDYMKFFDGLPA

SEQ ID NO: 372 - protein, 488 aa, Zea mays
  misc_feature (1)..(488): Ceres CLONE ID no. 1378809
  misc_feature (1)..(488)
  Functional Homolog of CDNA ID no. 4987967at SEQ ID no. 365with e-value of 5.3E-189 and percent identity of 75.81
MASASMLARSLLRTPDPTQTSHPNRRSAAVVSFPRRHRRLSVRASVSTACPSPPPQPAAAAAGVPKHCFRRGADGYLYCEGVRVEDAMTAAERSPFYLYSKPQILRNFAAYRDALQGLRSIIGYAVKANNNLPVLRVLRELGCGAVLVSGNELRLALQAGFDPARCIFNGNGKTLEDLKLAAESGVFVNVDSEFDLENIVRAARATGKKVPVLLRINPDVDPQVHPYVATGNKTSKFGIRNEKLQWFLDSIKSYPNEIKLVGVHCHLGSTITKVDIFRDAAVLMVNYVDEIRAQGFKLEYLNIGGGLGIDYHHTDAVLPTPMDLINTVRELVLSQDLTLIIEPGRSLIANTCCFVNRVTGVKSNGTKNFIVVDGSMAELIRPSLYGAYQHIELVSPPTPGAEVATFDIVGPVCESADFLGKDRELPTPDEGAGLVVHDAGAYCMSMASTYNLKLRPPEYWVEADGSIVKIRHGEKLDDYMKFFDGLPA

SEQ ID NO: 373 - protein, 484 aa, Triticum aestivum
  misc_feature (1)..(484): Ceres CLONE ID no. 697349
  misc_feature (1)..(484)
  Functional Homolog of CDNA ID no. 4987967at SEQ ID no. 365with e-value of 6.5E-191 and percent identity of 74.11
MAAANLLSRSLVPSLTPNPGSQPSRSRAASVSLRRRHGPAAPLRASLSTASPSTRVAMGEAPKHCFQRGADGHLYCEGVRVEDTMAAADRTPFYLYSKPQVVRNFTAYDKALQGLRSIVGYAVKANNNLSVLQLLRGLGCGAVLVSGNELRLALRAGFDPTRCIFNGNGKTLEDLVLAAESGVFVNIDSEFDLENIVTAARVAGRQVPVLLRINPDVDPQVHPYVATGNKTSKFGIRNEKLQWFLDSIKSYSNDIKLVGVHCHLGSTITKVDIFRDAANLMVNFVDEIRAQGFELEYLNIGGGLGIDYHHTGAVLPTPMDLINTVRELVLSRDLTLIIEPGRSLIANTCCFVNKVTGVKSNGTKNFIVVDGSMAELIRPSLYGAYQHIELVSPSPGAEVATFDIVGPVCESADFLGKDRELPTPEKGAGLVVHDAGAYCMSMASTYNLKMRPAEYWVEDDGSIVKIRHGETFDDYMKFFDGLPA

SEQ ID NO: 374 - protein, 490 aa, Oryza sativa subsp. japonica
  misc_feature (1)..(490): Public GI no. 50907773
  misc_feature (1)..(490)
  Functional Homolog of CDNA ID no. 4987967at SEQ ID no. 365with e-value of 9.9E-188 and percent identity of 72.92
MAAANLLSRALLPALNPNPSSHSNRVSPSAVSLRCRHGLTASVRASLSTAAPSPPPRPAAAAADGRAPKRCFRRGADGHLYCEGVRVEDAMGAAERTPFYLYSKPQVVRNFTAYRDALEGLRSIVGYAVKANNNLRVLQLLRELGCGAVLVSGNELRLALRAGFDPTRCIFNGNGKTLEDLVLAAESGVFVNIDSEFDLENIVTAARVAGKKVPVLLRINPDVDPQVHPYVATGNKTSKFGIRNEKLQWFLDSIKSYSNDITLVGVHCHLGSTITKVDIFRDAAGLMVNYVDEIRAQGFELEYLNIGGGLGIDYHHTDAVLPTPMDLINTVRELVLSRDLTLIIEPGRSLIANTCCFVNRVTGVKSNGTKNFIVVDGSMAELIRPSLYGAYQHIELVSPSPDAEVATFDIVGPVCESADFLGKDRELPTPDKGAGLVVHDAGAYCMSMASTYNLKLRPPEYWVEDDGSIAKIRRGESFDDYMKFFDNLSA

SEQ ID NO: 375 - DNA, 1741 bp, Arabidopsis thaliana
  misc_feature (1)..(1741): Ceres CDNA ID no. 3039543
  misc_feature (1)..(1741): Also Known As  Ceres SEEDLINE ME06241
atgccttcttctcatttctcaccaactccctccaaacccaacaaaagtgtttatattagcaaagccgccaaagtgtaaacgaaagtttataaatttcatttctgtgatcttacgtaattggaggaagatcaaaattttcaatccccattcttcgattgcttcaattgaagtttctccgatggcgcaagttagcagaatctgcaatggtgtgcagaacccatctcttatctccaatctctcgaaatccagtcaacgcaaatctcccttatcggtttctctgaagacgcagcagcatccacgagcttatccgatttcgtcgtcgtggggattgaagaagagtgggatgacgttaattggctctgagcttcgtcctcttaaggtcatgtcttctgtttccacggcggagaaagcgtcggagattgtacttcaacccattagagaaatctccggtcttattaagcttcctggctccaagtctctatcaaatcggatcctgcttctcgctgctctgtctgagggaacaactgtagtggacaacttgttgaatagcgatgacatcaattacatgcttgatgcgttgaagagattgggacttaatgtggaaactgacagtgaaaataatcgtgctgtagttgaaggatgtggcgggatattcccagcttccatagattcaaagagtgatatcgaactttacctcggtaatgcaggaacagcaatgcgtccacttaccgctgcggtcactgctgcaggtggaaacgcaagttatgtgcttgatggggtgcctcgtatgagagaaagacctataggggatttggttgttggtcttaagcagcttggtgctgatgttgaatgtactcttggaactaactgccctcctgttcgtgtcaacgctaatggtggccttcccggtggaaaggtgaagctttctggatcaattagtagtcagtacttgactgctctgctcatgtctgctcccttagctcttggagacgtcgagattgagattgtcgataaattaatttctgttccatatgttgaaatgacattgaagttgatggaacgtttcggggttagtgtcgagcatagtgatagctgggatcgtttctttgtcaagggcgggcaaaaatacaagtctccgggtaatgcgtatgtagaaggtgatgcttctagtgctagttatttcttggctggtgctgccattaccggtgaaactgtcacagtcgaaggttgtggaactaccagcttgcagggagatgtaaaattcgccgaggtccttgagaaaatgggatgtaaagtgtcctggacagagaacagtgtgactgtgacaggaccacctagagatgcttttggaatgagacacttgcgggctattgatgtcaacatgaacaaaatgcctgatgtagccatgacccttgccgtcgttgctctctttgctgacggtccaaccaccattagagatgtggctagctggagagtaaaggagacagaaaggatgattgccatttgcacagagcttagaaaactgggagctacagtggaagaaggttcagattattgtgtgataactccgcccaaaaaggtgaaaacggcagagattgatacatatgatgatcatagaatggcaatggcattctctcttgcagcttgtgctgatgttccaatcaccatcaacgatcctggttgcaccaggaaaaccttccccgactacttccaagtacttgaaagaatcacaaagcactaa

SEQ ID NO: 376 - protein, 520 aa, Arabidopsis thaliana
  misc_feature (1)..(520): Ceres CDNA ID no. 3039543
  misc_feature (1)..(520): Also Known As  Ceres SEEDLINE ME06241
  misc_feature (85)..(514): Pfam Name: EPSP_synthase Pfam Description: EPSP synthase (3-phosphoshikimate 1- carboxyvinyltransferase)
  misc_feature: Phenotype: High Anthocyanin Useful for increasing increasing anthocyanin content
  misc_feature: Phenotype: ROSETTE LEAVES Useful for making ornamental plants with modified leaves
  misc_feature: Phenotype: Oval Shaped Useful for making plants with increased biomass and foliage
  misc_feature: Phenotype: Short Internode Useful for making shorter plants and plants with modified flowers
  misc_feature: Phenotype: Reduced Apical Dominance Useful for modifying plant structure, ie increased branching
MAQVSRICNGVQNPSLISNLSKSSQRKSPLSVSLKTQQHPRAYPISSSWGLKKSGMTLIGSELRPLKVMSSVSTAEKASEIVLQPIREISGLIKLPGSKSLSNRILLLAALSEGTTVVDNLLNSDDINYMLDALKRLGLNVETDSENNRAVVEGCGGIFPASIDSKSDIELYLGNAGTAMRPLTAAVTAAGGNASYVLDGVPRMRERPIGDLVVGLKQLGADVECTLGTNCPPVRVNANGGLPGGKVKLSGSISSQYLTALLMSAPLALGDVEIEIVDKLISVPYVEMTLKLMERFGVSVEHSDSWDRFFVKGGQKYKSPGNAYVEGDASSASYFLAGAAITGETVTVEGCGTTSLQGDVKFAEVLEKMGCKVSWTENSVTVTGPPRDAFGMRHLRAIDVNMNKMPDVAMTLAVVALFADGPTTIRDVASWRVKETERMIAICTELRKLGATVEEGSDYCVITPPKKVKTAEIDTYDDHRMAMAFSLAACADVPITINDPGCTRKTFPDYFQVLERITKH

SEQ ID NO: 377 - protein, 516 aa, Brassica napus
  misc_feature (1)..(516): Public GI no. 17815
  misc_feature (1)..(516)
  Functional Homolog of CDNA ID no. 3039543at SEQ ID no. 376with e-value of 1.4E-252 and percent identity of 93.98
MAQSSRICHGVQNPCVIISNLSKSNQNKSPFSVSLKTHQPRASSWGLKKSGTMLNGSVIRPVKVTASVSTSEKASEIVLQPIREISGLIKLPGSKSLSNRILLLAALSEGTTVVDNLLNSDDINYMLDALKKLGLNVERDSVNNRAVVEGCGGIFPASLDSKSDIELYLGNAGTAMRPLTAAVTAAGGNASYVLDGVPRMRERPIGDLVVGLKQLGADVECTLGTNCPPVRVNANGGLPGGKVKLSGSISSQYLTALLMAAPLALGDVEIEIIDKLISVPYVEMTLKLMERFGVSAEHSDSWDRFFVKGGQKYKSPGNAYVEGDASSASYFLAGAAITGETVTVEGCGTTSLQGDVKFAEVLEKMGCKVSWTENSVTVTGPSRDAFGMRHLRAVDVNMNKMPDVAMTLAVVALFADGPTTIRDVASWRVKETERMIAICTELRKLGATVEEGSDYCVITPPAKVKPAEIDTYDDHRMAMAFSLAACADVPVTIKDPGCTRKTFPDYFQVLESITKH

SEQ ID NO: 378 - protein, 514 aa, Brassica rapa
  misc_feature (1)..(514): Public GI no. 46095337
  misc_feature (1)..(514)
  Functional Homolog of CDNA ID no. 3039543at SEQ ID no. 376with e-value of 1E-249 and percent identity of 93.57
MAQASRICQNPCVISNLPKSNHRKSPFSVSLKTHQQQRRAYQISSWGLKKSNNGSVIRPVKVMASVSTAEKASEIVLQPIRQISGLIKLPGSKSLSNRILLLAALSEGTTVVDNLLNSDDINYMLDALNKLGLNVERDSENNRAVVEGCGGIFPASLDSKGDIELYLGNAGTAMRPLTAAVTAAGGNASYVLDGVPRMRERPIGELVVGLKQLGADVECTLGTNCPPVRVNANGGLPGGKVKLSGSISSQYLTALLMAAPLALGDVEIEIIDKLISVPYVEMTLKLMERFGVSAEHSDSWDRFFVKGGQKYKSPGNAYVEGDASSASYFLAGAAITGETVTVEGCGTTSLQGDVKFAEVLEKMGCKVSWTENSVTVTGPSRDAFGMRHLRAVDVNMNKMPDVAMTLAVVALFADGPTTIRDVASWRVKETERMIAICTELRKLGATVEEGSDYCVITPPAKVKPAEIDTYDDHRMAMAFSLAACADVPVTIKDPGCTRKTFPDYFQVLESITKH

SEQ ID NO: 379 - protein, 518 aa, Orychophragmus violaceus
  misc_feature (1)..(518): Public GI no. 18251236
  misc_feature (1)..(518)
  Functional Homolog of CDNA ID no. 3039543at SEQ ID no. 376with e-value of 5.1E-255 and percent identity of 93.24
MAQASRICHGIQSPYVISNLAKSNQPKSPLSISLKSQQPRAYPISSWGLKKSGMMLNDSVIRPVTVTASVSTAEKASEIVLQPIKEISGLIKLPGSKSLSNRILLLAALSEGTTVVDNLLNSDDINYMLDALKKLGLNVERDSENNRAVVEGCGGIFPASVDSKSDIELYLGNAGTAMRPLTAAVTAAGGNASYVLDGVPRMRERPIGDLVVGLKQLGADVECTLGTNCPPVRVNANGGLPGGKVKLSGSISSQYLTALLMAAPLALGDVEIEIIDKLISVPYVEMTLKLMERFGVSAEHSESWDRFFVKGGQKYKSPGNAYVEGDASSASYFLAGAAITGETVTVEGCGTTSLQGDVKFAEVLEKMGCKVSWTENSVTVTGPSRDAFGMRHLRAVDVNMNKMPDVAMTLAVVALFADGPTTIRDVASWRVKETERMIAICTELRKLGATVEEGSDYCVITPPAKVKPAEIDTYDDHRMAMAFSLAACADVPVTIKDPGCTRKTFPDYFQVLESITKH

SEQ ID NO: 380 - protein, 523 aa, Conyza canadensis
  misc_feature (1)..(523): Public GI no. 48526086
  misc_feature (1)..(523)
  Functional Homolog of CDNA ID no. 3039543at SEQ ID no. 376with e-value of 7.9E-202 and percent identity of 83.55
MAVHINNSNIPIFNTSNLTTQNPSSKSSSFLSFGSNFKNPLKNNNNNNYTSVSCNVKNNKNPFKVSAFSATSTKEKPSKAPEEIVLKPIQEISGTVHLPGSKSLSNRILLLAALSEGTTVVDNLLNSDDVHYMLGALRALGLNVEENSAIKRAIVEGCGGVFPVGKEAKDEIQLFLGNAGTAMRPLTAAVTAAGGNSSYILDGVPRMRERPIGDLVTGLKQLGANVDCSLGTNCPPVRVVGSGGLPGGKVKLSGSISSQYLTSLLMAAPLALGDVEIEIVDKLISVPYVEMTLKLMERFGVSVEHSDTWDRFHVRGGQKYKSPGNAYVEGDASSASYFLAGAAITGGTVTVEGCGTSSLQGDVKFAEVLGQMGAEVTWTENSVTVKGPPRNSSGRGHLRPVDVNMNKMPDVAMTLAVVALYADGPTAIRDVASWRVKETERMIAICTELRKLGATVEEGPDYCVITPPEKLNVTAIDTYDDHRMAMAFSLAACAEVPVTIKDPGCTRKTFPDYFEVLERYTKH

SEQ ID NO: 381 - DNA, 1732 bp, Arabidopsis thaliana
  misc_feature (1)..(1732): Ceres CDNA ID no. 7090814
  misc_feature (1)..(1732): Also Known As  Ceres SEEDLINE ME06254
tctctagaaaaaatggcttcgtcttgtctcttcaatgcctctgtatcgtccttaaaccctaaacaagaccccatccgccgccaccggtcaacctctctcctccgccaccgccccgtcgtcatctcctgtaccgccgatggcaacaacatcaaagccccgatcgagacagcggtcaagcctcctcaccgtaccgaggataacattcgagatgaggctcgtcgtaatcgttccaacgccgtgaatccattttcagctaaatacgttccgtttaatgcagctcctggatccacggagtcttactctctcgacgagatcgtgtaccgtagccgctccggtggtttgcttgatgtcgaacacgatatggaggctttgaagcgattcgatggcgcgtattggcgtgatctcttcgattcgcgtgttggtaaaagcacatggccttatggatcgggtgtttggtcgaagaaagagtgggttcttcctgagatcgatgacgacgacatcgtttcagcttttgaaggaaactcgaatctgttctgggcagagagatttggtaagcagtttctaggtatgaatgatctgtgggtgaaacactgtgggattagtcatacaggaagtttcaaggatcttggaatgactgttttggttagtcaagttaatcgtctgagaaagatgaaacgacctgtggttggtgtcggatgtgcttccaccggagatacttctgctgctctatctgcttactgcgcctccgctggaatcccatcgattgtgtttttaccggcgaacaagatctctatggctcagctggttcagccgatagctaatggtgcgtttgttttgagtattgacactgattttgatgggtgtatgaagctgattagagagataactgcggaattgccgatttatttggcgaattcgttgaatagtttgaggttagaagggcagaaaactgcagctattgagattttgcagcagtttgattggcaagttcctgattgggtgattgttcctggaggtaacctaggaaacatctatgccttttacaaagggtttaagatgtgtcaagaactgggacttgtcgataggatcccgaggatggtctgtgcacaagcagctaatgctaatcctctttacttgcactacaagtctggttggaaggacttcaagcccatgactgcaagtaccactttcgcctctgcgattcagatcggtgaccctgtctccatcgatagagctgtgtacgctctcaagaagtgcaatggtattgtagaagaagccacagaggaggagctgatggatgcgatggctcaagcggattcgacaggaatgtttatctgtcctcatacaggtgttgctctaactgctctgttcaagctgaggaatcaaggagtgattgcaccgactgatcgaactgtggtagtgagtactgctcatgggttgaagtttactcagtctaagatagattatcactccaatgccatccctgacatggcttgcagattctccaatcctcctgttgatgtgaaagcagatttcggagctgtcatggatgttctcaagagttacttaggaagtaatacacttacgtcataagagacaagaccataatctttagctgttttgttttttgaaaacttttagacgtttgtttgcgttactcttcaactcatctctctgtgatctttatctgtttctcagttttccaataaagttctatcgcaaagtttgaatc

SEQ ID NO: 382 - protein, 526 aa, Arabidopsis thaliana; identical to SEQ ID NO: 357
  misc_feature (1)..(526): Ceres CDNA ID no. 7090814
  misc_feature (1)..(526): Also Known As  Ceres SEEDLINE ME06254
  misc_feature (164)..(474): Pfam Name: PALP Pfam Description: Pyridoxal-phosphate dependent enzyme
  misc_feature: Phenotype: Dark Green Useful for increasing chlorophyll and photosynthetic capacity
  misc_feature: Phenotype: WHOLE PLANT Useful for making bigger plants
  misc_feature: Phenotype: Lanceolate Shaped Useful for making plants with increased biomass and foliage
  misc_feature: Phenotype: Short Useful for making shorter plants
  misc_feature: Phenotype: Reduced Apical Dominance Useful for modifying plant structure, ie increased branching

SEQ ID NO: 383 - protein, 486 aa, Arabidopsis thaliana
  misc_feature (1)..(486): Public GI no. 15825883
  misc_feature (1)..(486)
  Functional Homolog of CDNA ID no. 7090814at SEQ ID no. 382with e-value of 5.1E-255 and percent identity of 97.12
  misc_feature (77)..(77): Xaa is any aa, unknown, or other
  misc_feature (146)..(146): Xaa is any aa, unknown, or other
  misc_feature (167)..(167): Xaa is any aa, unknown, or other
  misc_feature (180)..(180): Xaa is any aa, unknown, or other
  misc_feature (221)..(221): Xaa is any aa, unknown, or other
  misc_feature (245)..(245): Xaa is any aa, unknown, or other
  misc_feature (309)..(309): Xaa is any aa, unknown, or other
  misc_feature (322)..(322): Xaa is any aa, unknown, or other
  misc_feature (347)..(347): Xaa is any aa, unknown, or other
  misc_feature (388)..(388): Xaa is any aa, unknown, or other
  misc_feature (391)..(391): Xaa is any aa, unknown, or other
  misc_feature (399)..(399): Xaa is any aa, unknown, or other
  misc_feature (453)..(453): Xaa is any aa, unknown, or other
  misc_feature (472)..(472): Xaa is any aa, unknown, or other
ADGNNIKAPIETAVKPPHRTEDNIRDEARRNRSNAVNPFSAKYVPFNAAPGSTESYSLDEIVYRSRSGGLLDVEHDXEALKRFDGAYWRDLFDSRVGKSTWPYGSGVWSKKEWVLPEIDDDDIVSAFEGNSNLFWAERFGKQFLGXNDLWVKHCGISHTGSFKDLGXTVLVSQVNRLRKXKRPVVGVGCASTGDTSAALSAYCASAGIPSIVFLPANKISXAQLVQPIANGAFVLSIDTDFDGCXKLIREITAELPIYLANSLNSLRLEGQKTAAIEILQQFDWQVPDWVIVPGGNLGNIYAFYKGFKXCQELGLVDRIPRXVCAQAANANPLYLHYKSGWKDFKPXTASTTFASAIQIGDPVSIDRAVYALKKCNGIVEEATEEELXDAXAQADSTGXFICPHTGVALTALFKLRNQGVIAPTDRTVVVSTAHGLKFTQSKIDYHSNAIPDXACRFSNPPVDVKADFGAVXDVLKSYLGSNTLTS

SEQ ID NO: 384 - protein, 519 aa, Solanum tuberosum; identical to SEQ ID NO: 356
  misc_feature (1)..(519): Public GI no. 8439547
  misc_feature (1)..(519)
  Functional Homolog of CDNA ID no. 7090814at SEQ ID no. 382with e-value of 2.3E-227 and percent identity of 84.48

SEQ ID NO: 385 - protein, 515 aa, Glycine max; identical to SEQ ID NO: 361
  misc_feature (1)..(515): Ceres CLONE ID no. 578495
  misc_feature (1)..(515)
  Functional Homolog of CDNA ID no. 7090814at SEQ ID no. 382with e-value of 2.3E-211 and percent identity of 82.95

SEQ ID NO: 386 - protein, 516 aa, Arabidopsis thaliana; identical to SEQ ID NO: 355
  misc_feature (1)..(516): Ceres CLONE ID no. 1187996
  misc_feature (1)..(516)
  Functional Homolog of CDNA ID no. 7090814at SEQ ID no. 382with e-value of 1.4E-218 and percent identity of 82.86

SEQ ID NO: 387 - protein, 516 aa, Arabidopsis thaliana; identical to SEQ ID NO: 355
  misc_feature (1)..(516): Public GI no. 20466326
  misc_feature (1)..(516)
  Functional Homolog of CDNA ID no. 7090814at SEQ ID no. 382with e-value of 1.4E-218 and percent identity of 82.86

SEQ ID NO: 388 - protein, 527 aa, Zea mays; identical to SEQ ID NO: 362
  misc_feature (1)..(527): Ceres CLONE ID no. 280346
  misc_feature (1)..(527)
  Functional Homolog of CDNA ID no. 7090814at SEQ ID no. 382with e-value of 1.1E-197 and percent identity of 78.80

SEQ ID NO: 389 - protein, 521 aa, Oryza sativa subsp. japonica
  misc_feature (1)..(521): Public GI no. 50932643
  misc_feature (1)..(521)
  Functional Homolog of CDNA ID no. 7090814at SEQ ID no. 382with e-value of 4.1E-198 and percent identity of 77.55
MAATTHAASLSFLLSHPHPTSPNPNPNPNLPLRRAPHRVRCATDAAATRHRRAADENIREEAARHRAPNHNFSAWYAPFPPAPNGDPDERYSLDEIVYRSSSGGLLDVRHDMDALARFPGSYWRDLFDSRVGRTTWPFGSGVWSKKEFVLPEIDPDHIVSLFEGNSNLFWAERLGRDHLAGMNDLWVKHCGISHTGSFKDLGMTVLVSQVNRLRRAPLSRPIAGVGCASTGDTSAALSAYCAAAGIPAIVFLPANRISLEQLIQPIANGATVLSLDTDFDGCMRLIREVTAELPIYLANSLNSLRLEGQKTAAIEILQQFDWEVPDWVIVPGGNLGNIYAFYKGFEMCRVLGLVDRVPRLVCAQAANANPLYRYYKSGWTEFTPQVAEPTFASAIQIGDPVSVDRAVVALKATDGIVEEATEEELMNAMSLADRTGMFACPHTGVALAALFKLRDQRIIGPNDRTVVVSTAHGLKFSQSKIDYHDSKIEDMACKYANPPVSVKADFGAVMDVLKKRLKGKL

SEQ ID NO: 390 - DNA, 1796 bp, Arabidopsis thaliana
  misc_feature (1)..(1796): Ceres CDNA ID no. 7094546
  misc_feature (1)..(1796): Also Known As  Ceres SEEDLINE ME06459
ttcggcttaacttaacctacatagtacataccaagaagaagaagaggcaaagaaaaagatgataacgggaaacgaattctacacggtgatgtgtgccatggcaccactctacttcgccatgttcgtggcttatggatcggtaaagtggtgcaagatcttcacgccggcgcaatgttccggaatcaaccgttttgtctccgttttcgccgtcccagtcctctctttccacttcatctcacaaaacaacccttacaaaatggacacaatgttcatcctcgccgacactttgtccaaaatcttcgtcttcgttttgctctctctatgggccgttttcttcaaagccggtggtctcgattggctcatcactctattctcaatcgctactctccctaacactctcgttatgggcatacctttgcttcaggccatgtatggagattacactcaaaccctcatggtccaactcgttgttcttcaatgcatcatttggtatactctgctactattcctctttgaactccgagcagcgaggttgcttatccgagcagagtttccgggtcaagcagccggatcaatcgccaagatccaagtcgacgatgacgtcatttccttagacggcatggatccgctccgtacagaaactgaaaccgatgttaacggtcggatcaggctcaggatccgacggtccgtatcatccgtacctgattctgttatgtcctcctccttgtgcttaacccctagagcctctaatctttctaacgccgagattttctccgtcaacactcctaataaccgtttcttccacggcggaggaggaagcggtacccttcagttttataacggtagtaacgagatcatgttttgtaacggagatttaggcgggttcggatttactcgacccggattaggtgcaagtcctagaaggctctcgggttatgcttcctccgatgcttactcgttgcagccaacaccacgtgcctcgaactttaacgagcttgacgttaacggaaacggtacgccggtttggatgaaatctcctgccgccgggagaatataccggcaatcttcgccgaagatgatgtgggagtctgggcaaagacatgcagccaaagatatcaatggatcagtgccagagaaggagattagcttcagagacgcacttaaggctgcaccacaggctacggcagccggtggtggtgcttccatggaggaaggagccgccggaaaagacacaactccggtggctgcgattggcaagcaagaaatgccaagtgcaattgtaatgatgcgcctcatactaacagtcgtgggccgcaagctttctcgaaaccctaacacttattccagcctcttaggtcttgtctggtcacttatatccttcaaatggaatataccgatgccaaatatagtggatttctcgataaagatcatttcagatgcaggtcttgggatggctatgtttagtttaggcctgtttatggcgctgcagccaaagatgatcccttgtggggcgaaaaaggcaacaatggggatgttgatcaggttcatctcaggtcctcttttcatggctggtgcttcccttcttgtcggattaagaggttctaggttacatgctgctatcgtacaggctgctctaccgcaagggatagtaccatttgtgtttgcgagggagtacaatttgcatccagacctactcagtacattggttatctttgggatgatagtatctttaccagtaactattttgtactacgtcctcttgggcctatgattcacacaacacactgaagccgaat

SEQ ID NO: 391 - protein, 570 aa, Arabidopsis thaliana
  misc_feature (1)..(570): Ceres CDNA ID no. 7094546
  misc_feature (1)..(570): Also Known As  Ceres SEEDLINE ME06459
  misc_feature (9)..(565): Pfam Name: Auxin_eff Pfam Description: Auxin Efflux Carrier
  misc_feature: Phenotype: Oval Shaped Useful for making plants with increased biomass and foliage
  misc_feature: Phenotype: Short Petioles Useful for making smaller plants
MITGNEFYTVMCAMAPLYFAMFVAYGSVKWCKIFTPAQCSGINRFVSVFAVPVLSFHFISQNNPYKMDTMFILADTLSKIFVFVLLSLWAVFFKAGGLDWLITLFSIATLPNTLVMGIPLLQAMYGDYTQTLMVQLVVLQCIIWYTLLLFLFELRAARLLIRAEFPGQAAGSIAKIQVDDDVISLDGMDPLRTETETDVNGRIRLRIRRSVSSVPDSVMSSSLCLTPRASNLSNAEIFSVNTPNNRFFHGGGGSGTLQFYNGSNEIMFCNGDLGGFGFTRPGLGASPRRLSGYASSDAYSLQPTPRASNFNELDVNGNGTPVWMKSPAAGRIYRQSSPKMMWESGQRHAAKDINGSVPEKEISFRDALKAAPQATAAGGGASMEEGAAGKDTTPVAAIGKQEMPSAIVMMRLILTVVGRKLSRNPNTYSSLLGLVWSLISFKWNIPMPNIVDFSIKIISDAGLGMAMFSLGLFMALQPKMIPCGAKKATMGMLIRFISGPLFMAGASLLVGLRGSRLHAAIVQAALPQGIVPFVFAREYNLHPDLLSTLVIFGMIVSLPVTILYYVLLGL

SEQ ID NO: 392 - DNA, 1533 bp, Populus balsamifera subsp. trichocarpa
  misc_feature (1)..(1533): Ceres GDNA ANNOT ID no. 1496106
atgataactgccggcgatttctacaaggtcatgtgtgcgatggtgcctctgtattttgcaatgctggttgcgtatgggtcagttaaacggtacaagatattcacaccggagcagtgctcagggatcaacagatttgttgctgtttttgcagtcccggtgctatctttccacttcatagctcaaaataatccataccagatggacaccaggttcataatggccgataccctttcgaaagtcttggtccttgttctgctgtcaatatgggttattttcttcaatggaggattggattggctcatcactctcttctcaattgctactttgcctaacacacttgtcatgggcattcctttgctcaaggccatgtatggagatttcacccagagcctcatggtgcaagtggttgttctccaatgtataatatggtacacgcttttgctcttcctctttgaatacagggctgcaaccctcctgatcaaaacccaattccctggccccaaagcagcctccatttccaaaatcgaactcgacaatgatgtcatctccctcgacggcagggatccacttcgcacagaatctgaaacagacggaaacggacgccttcgcgtccgcatcagacggtccacgtcatcggctcccgactctgctctatcatcttccatatgccttactcctagaccctcaaacctctccaacgccgaagttttctcggtcagcactcctgccccattgcaagaataccatggttataatggtcgtttcagtcatggacccaacaatgagataatgctttgtaatggtgacttgggatttggatatcatcggtctggaacgagtccgaggttgtcaggatacgcgtcatcagatgcttactcacttcaacccacgccacggacttccaattttaatgaatgggacttgactaatgcaaccaacacacctttctgggcccgatctccagtcgccggtaaaatatcccggcatccatctccggcggttcctgagctcaggctagtatggggtgagtcaccggtaatgtgtccaaatggcggcggcaaagagattgcagggaggaagctctctcgcaatcccaacacatattcaagtgttttggggcttctttggtctttagtctctttcaaatggaatgtgggaatgcccagcttggtgaaatattcaataaaaataatttcagatgcaggtcttgggatggctatgttcagtttagggttgttcatggctcttcagcctcggattattgtctgtggcaagaagagggcgaccatggcaatggcaatccgattcatttgtggacccgtcgtaatgtcaaccgcttcgcttgctgttggaatgagaggggaacggctccgtgcagccatagtgcaggcagctctctcacaggggattgtgccatttgtctttgcaagagaatatgggttgcatcctgatataatgagcacaggggtgattttcggcatgctagtttccttaccggtaaccctcctctactatatatttatagggctgtga

SEQ ID NO: 393 - protein, 500 aa, Populus balsamifera subsp. trichocarpa
  misc_feature (1)..(500): Ceres GDNA ANNOT ID no. 1496106
  misc_feature (1)..(500)
  Functional Homolog of CDNA ID no. 7094546at SEQ ID no. 391with e-value of 1.1E-178 and percent identity of 74.25
MCAMVPLYFAMLVAYGSVKRYKIFTPEQCSGINRFVAVFAVPVLSFHFIAQNNPYQMDTRFIMADTLSKVLVLVLLSIWVIFFNGGLDWLITLFSIATLPNTLVMGIPLLKAMYGDFTQSLMVQVVVLQCIIWYTLLLFLFEYRAATLLIKTQFPGPKAASISKIELDNDVISLDGRDPLRTESETDGNGRLRVRIRRSTSSAPDSALSSSICLTPRPSNLSNAEVFSVSTPAPLQEYHGYNGRFSHGPNNEIMLCNGDLGFGYHRSGTSPRLSGYASSDAYSLQPTPRTSNFNEWDLTNATNTPFWARSPVAGKISRHPSPAVPELRLVWGESPVMCPNGGGKEIAGRKLSRNPNTYSSVLGLLWSLVSFKWNVGMPSLVKYSIKIISDAGLGMAMFSLGLFMALQPRIIVCGKKRATMAMAIRFICGPVVMSTASLAVGMRGERLRAAIVQAALSQGIVPFVFAREYGLHPDIMSTGVIFGMLVSLPVTLLYYIFIGL

SEQ ID NO: 394 - DNA, 1641 bp, Populus balsamifera subsp. trichocarpa
  misc_feature (1)..(1641): Ceres GDNA ANNOT ID no. 1505326
atgatcactgcagatgatttctacaaggtcatgtgtgcaatggtgcctctgtattttgcaatgctggttgcgtatggatcagtgaaatggtacaagatattcacaccagagcagtgctcagggatcaacagatttgttgctgtttttgcagtccctgtgctgtctttccacttcatcgctcaaaacaatccataccaaatggacaccaagttcatactggctgatactctttcgaaagtcttagcccttgttctgctctcagtgtgggctgttttctttaatggagaatttgactggcttatcactctcttctcagtcgctactttgcctaacacacttgtcatgggcattcctttgctcaaggccatgtatggagatttcacacagagcctcatggtgcaagtggttgttcttcaatgtataatatggtacacgcttctgctcttcctctttgaatacagagctgcaaccctcctaatcaaagcccaatttcccggccccacagcagccaccatttccaaaatcgaactcgacgacgacgtcatctcgctcgacggcagggatccactccgcacagaatcagaaacagacggcaacggacgcatacgagtccgcatcagacggtccacatcttcggctccagactccgctctatcatcctccatatgcctcactcctagaccatcaaacctctccaacgccgaagttttctccgttaacacacctgtaccactgcacgaataccatggttataatggtcatttcagtcatggacccaacaatgagattgtgctatgtaatggtgacttgggattggcatatcggtctggaacgagtccgaggttgtcaggatacgcgtcgtctgatgcttactcacttcaaccgacaccacgtgcgtccaactttaacgaattggacctaactaatgcaacgaacacgcctttttgggtccgatctccggtcgccggtaaaatttaccggcagccatctccggcggttcctgaagtcaagctagtctggggtgagtcgccagtaatatgtccaaatggcggcaaggaaatcagcttcagagacagttgtaaaatgccagcaccagaggaatcgaattcgaaggaatcagtgagcaaccaagaaatgccgcatgccattgtcatgattagacttatacttgttgtggtagggaggaagctctcccgaaatccaaatacatactcgagtgtcttggggcttctctggtctttagcctctttcaaatggaatgtgggaatgcccagcttggtgaaatattcaataaaaataatttcagacgcaggtcttgggatggccatgttcagtttagggttgttcatggctcttcagcctcggataattgtatgcggcaagaaaagggcaacaatggcaatggcaatccgattcatttgtgggccaatcgtaatgtcgacaacttcggtcgctgttggaatgagaggagtgcggctccgtgcggccatagtgcaggcagctctttcacaagggattgtgccattcgtctttgcaagggaatacgggttgcatcccgatataatgagtacaggggtaatcttcggcatgttggtttccttgccggtaaccctcatctactatatatttctaggcctgtga

SEQ ID NO: 395 - protein, 536 aa, Populus balsamifera subsp. trichocarpa
  misc_feature (1)..(536): Ceres GDNA ANNOT ID no. 1505326
  misc_feature (1)..(536)
  Functional Homolog of CDNA ID no. 7094546at SEQ ID no. 391with e-value of 3E-194 and percent identity of 74.05
MCAMVPLYFAMLVAYGSVKWYKIFTPEQCSGINRFVAVFAVPVLSFHFIAQNNPYQMDTKFILADTLSKVLALVLLSVWAVFFNGEFDWLITLFSVATLPNTLVMGIPLLKAMYGDFTQSLMVQVVVLQCIIWYTLLLFLFEYRAATLLIKAQFPGPTAATISKIELDDDVISLDGRDPLRTESETDGNGRIRVRIRRSTSSAPDSALSSSICLTPRPSNLSNAEVFSVNTPVPLHEYHGYNGHFSHGPNNEIVLCNGDLGLAYRSGTSPRLSGYASSDAYSLQPTPRASNFNELDLTNATNTPFWVRSPVAGKIYRQPSPAVPEVKLVWGESPVICPNGGKEISFRDSCKMPAPEESNSKESVSNQEMPHAIVMIRLILVVVGRKLSRNPNTYSSVLGLLWSLASFKWNVGMPSLVKYSIKIISDAGLGMAMFSLGLFMALQPRIIVCGKKRATMAMAIRFICGPIVMSTTSVAVGMRGVRLRAAIVQAALSQGIVPFVFAREYGLHPDIMSTGVIFGMLVSLPVTLIYYIFLGL

SEQ ID NO: 396 - protein, 527 aa, Medicago truncatula
  misc_feature (1)..(527): Public GI no. 49035694
  misc_feature (1)..(527)
  Functional Homolog of CDNA ID no. 7094546at SEQ ID no. 391with e-value of 3.5E-176 and percent identity of 70.99
MVTREDLYNVMCAMVPLYFAMLVAYGSVKCCKMFTPDQCSGINRFVAVFAVPVLSFHFISLNNPYQMDTKFILADTISKLLVLFFLTIWAIFFTKGSLDWVITLFSVATLPNTLVMGIPLLQAMYGDFTQSLMVQLVVLQCIIWYTLLLFLLEYRAAKLLIKSQFPGTTAASITKISLDDDVISLYSHDAPLTTQSETDENGRIKVRIRRSISSAPPESTSSLGKSFTPTRLSNLSNADIFSINTPGNFLDNMTSPQLSGYASTDAYSLQPTPRASNFNEMEIVGGGTPVWGRSPVAGGRVLDGGMVVWESPEKWRGDGGHGCKDITMSDKEISFRDSLKVSVAGEVVDPKDQIASSPKMPYAFVMLRLILIVAGRKLSRNPNTYSSLLGLLWSLISFKWNIEMPSLIKSSIKIISDAGLGMAMFSLGLFMALQPRIIACGTKRAAMGMAIRFLFGPLVMSLSSIAVGLRGKKLHTAIVQAALPQGIVPFVFAREYGLHPDILSTGVIFGMLISLPITLIYYIFLGL

SEQ ID NO: 397 - protein, 635 aa, Brassica juncea
  misc_feature (1)..(635): Public GI no. 15485155
  misc_feature (1)..(635)
  Functional Homolog of CDNA ID no. 7094546at SEQ ID no. 391with e-value of 1.7E-128 and percent identity of 56.09
MISWHDLYTVLTAVIPLYVAMILAYGSVRWWKIFSPDQCSGINRFVAIFAVPLLSFHFISTNNPYAMNLRFIAADTLQKILMLALLVLWANFTRSGSLEWSITIFSLSTLPNTLVMGIPLLIAMYGEYAGSLMVQVVVLQCIIWYTLLLFLFEFRGAKMLIMEQFPETAASIVSFKVESDVVSLDGHDFLETDAEIGNDGKLHVTVRKSNASRRSFCGPNMTPRPSNLTGAEIYSLSTTPRGSNFNNSDFYSMMGFPGGRLSNFGPADMYSVQSSRGPTPRPSNFEENSAMASSPRFGYYPGGGGGSYPAPNPEFSSATATSTANKVVSKNPTNPQTGGKANNHDASAKELHMFVWSSNGSPVSDRAGLNVSDGAPGSGSNNEQGAKEIRMLVPDQSQTGETKAFAHPASGDFGGERFSFAGREEEGERAKDAENGLNKHAPSSSAELQSKTGLGAAGGGEGSHVKHMPPASVMTRLILIMVWRKLIRNPNTYSSLIGLIWALVAFRWHVAMPKIIQQSISILSDAGLGMAMFSLGLFMALQPKLIACGNSVATFAMAVRFLTGPAVMAVASIAIGLHGDLLRVAIVQAALPQGIVPFVFAKEYNVHPAILSTGVIFGMLIALPITLVYYILLGL

SEQ ID NO: 398 - protein, 617 aa, Cucumis sativus
  misc_feature (1)..(617): Public GI no. 25956262
  misc_feature (1)..(617)
  Functional Homolog of CDNA ID no. 7094546at SEQ ID no. 391with e-value of 5.8E-135 and percent identity of 54.50
MITLSDFYHVMTAVVPLYVAMILAYGSVKWWKIFTPDQCSGINRFVALFAVPLLSFHFISTNNPYTMNLRFIAADTLQKLIVLAVLAVWSNISKRGCLEWTITLFSLSTLPNTLVMGIPLLKGMYGDFSGSLMVQIVVLQCIIWYTLMLFMFEYRGARMLISEQFPDTAGSIVSIHVDSDIMSLDGRQVLETEAEIKEDGKLHVTVRKSNASRSDIFSRRSVGLSSTTPRPSNLTNAEIYSLQSSRNPTPRGSSFNHTDFYSMMAAGGRNSNFGSSDVYGLSASRGPTPRPSNYEEEGGGNGGKPRFHYNATTGGNANANANANVNHYPAPNPGMFSPTGSKNAQPNNAKKPANGKTEDGSRDLHMFVWSSSASPVSDVFGNHEFGAHNDQKDVRLAVSPGKEGRRENQEEYAEREDFSFGNREMMNSNNNGGVGVGGTEKVGDIKPKTMPPTSVMTRLILIMVWRKLIRNPNTYSSLIGLTWSLVSFRWNVEMPAIIAKSISILSDAGLGMAMFSLGLFMALQPRIIACGNSIAAFSMAVRFLTGPAVMAVASIAVGLRGVLLRVAIVQAALPQGIVPFVFAKEYNVHPDILSTGVIFGMLVALPITLVYYILLGI

SEQ ID NO: 399 - protein, 640 aa, Brassica juncea
  misc_feature (1)..(640): Public GI no. 15485153
  misc_feature (1)..(640)
  Functional Homolog of CDNA ID no. 7094546at SEQ ID no. 391with e-value of 2.2E-126 and percent identity of 54.48
MISWHDLYTVLTAVIPLYVAMILAYGSVRWWKIFSPDQCSGINRFVAIFAVPLLSFHFISTNNPYAMNLRFIAADTLQKILMLALLVLWANFTRSGSLEWSITIFSLSTLPNTLVMGIPLLIAMYGEYAGSLMVQVVVLQCIIWYTLLLFLFEFRGAKMLIMEQFPETAASIVSFKVESDVVSLDGHDFLETDAEIGDDGKLHVTVRKSNASRRSFCGPNMTPRPSNLTGAEIYSLSTTPRGSNFNNSDFYSMMGFPGGRLSNFGPADMYSVQSSRGPTPRPSNFEENSAIASSPRFGYYPGGGGGGSYPAPNPEFASTTTTSATNKAVSKNPKDVNTNLQTGGKANNHDASAKELHMFVWSSNGSPVSDRAGLNVFDGAPGSGSNNEQGAKEIRMLVPDESQNGETKALARPASGEFGGERFSFAGREEEGERAKDAENGLNKHAPSSSAELQSKTGLGAAGGGEASHVKHMPPASVMTRLILIMVWRKLIRNPNTYSSLIGLIWALVAFRWHVAMPKIIQQSISILSDAGLGMAMFSLGLFMALQPKLIACGNSVATFAMAVRFLTGPAVMAVASIAIGLHGDLLRVAIVQAALPQGIVPFVFAKEYNVHPAILSTGVIFGMLIALPITLVYYILLGL

SEQ ID NO: 400 - protein, 614 aa, Oryza sativa subsp. japonica
  misc_feature (1)..(614): Public GI no. 50912665
  misc_feature (1)..(614)
  Functional Homolog of CDNA ID no. 7094546at SEQ ID no. 391with e-value of 4.6E-126 and percent identity of 54.36
MVPLYVAMILAYGSVKWWRIFTPDQCSGINRFVALFAVPLLSFHFISTNNPYTMNLRFIAADTLQKLMVLAMLTAWSHLSRRGSLEWTITLFSLSTLPNTLVMGIPLLKGMYGEFSGSLMVQIVVLQCIIWYTLMLFMFEYRGARMLITEQFPDTAANIASIVVDPDVVSLDGRRDAIETETEVKEDGRIHVTVRRSNASRSDIYSRRSMGFSSTTPRPSNLTNAEIYSLQSSRNPTPRGSSFNHTDFYSMVGRSSNFGAADAFGVRTGATPRPSNYEDDASKPKYPLPASNAAPMAGHYPAPNPAVSSAPKGAKKAATNGQAKGEDLHMFVWSSSASPVSDVFGGGAPDYNDAAAVKSPRKSSNLLSSPCTICLIWGAFLGLICTDSYISFTSVDGAKDREDYVERDDFSFGNRGVMDRDAEAGDEKAAAAAGADPSKAMAAPTAMPPTSVMTRLILIMVWRKLIRNPNTYSSLIGLIWSLVCFRWNFEMPAIVLKSISILSDAGLGMAMFSLGLFMALQPHIIACGNKVATYAMAVRFLAGPAVMAAASFAVGLRGTLLHVAIVQAALPQGIVPFVFAKEYSVHPSILSTAVIFGMLIALPITLVYYILLGL

SEQ ID NO: 401 - protein, 639 aa, Brassica juncea
  misc_feature (1)..(639): Public GI no. 12331173
  misc_feature (1)..(639)
  Functional Homolog of CDNA ID no. 7094546at SEQ ID no. 391with e-value of 4.5E-128 and percent identity of 54.35
MISWHDLYTVLTAVIPLYVAMILAYGSVRWWKIFSPDQCSGINRFVAIFAVPLLSFHFISTNNPYAMNLRFIAADTLQKILMLALLVLWANFTRSGSLEWSITIFSLSTLPNTLVMGIPLLIAMYGEYAGSLMVQVVVLQCIIWYTLLLFLFEFRGAKMLIMEQFPETAASIVSFKVESDVVSLDGHDFLETDAEIGNDGKLHVTVRKSNASRRSFCGPNMTPRPSNLTGAEIYSLSTTPRGSNFNQSDFYSMMGFPGGRLSNFGPADMYSMQSSRGPTPRPSNFEENCAMASSPKFGYHPGGGGGSYPAPNPEFSSTSTANKVVNKTPKDTNTNQQTNLHTDGKSNNHDASSKELHMFVWSSNGSPVSDRAGLNAPDSGSNNEQGGRSDQGAKEIRMLVPDQSQNSENKALARPASGDFGGEPVSITRREEGERAKDAENGLNKPIPNALLQSKTGLGAVPGGEASQGKHMPPASVMTRLILIMVWRKLIRNPNTYSSLIGLIWALVAFRWHVAMPKIIQQSISILSDAGLGMAMFSLGLFMALQPKLIACGNSVATFAMAVRFLTGPAVMAVASIAIGLRGDLLRVAIVQAALPQGIVPFVFAKEYNVHPAILSTGVIFGMLIALPITLVYYILLGL

SEQ ID NO: 402 - DNA, 3591 bp, Arabidopsis thaliana
  misc_feature (1)..(3591): Ceres CDNA ID no. 1821568
  misc_feature (1)..(3591): Also Known As  Ceres SEEDLINE ME06460
atgaagactttttcaagcttctttctctctgtaacaactctcttcttcttctccttcttttctctttcatttcaagcttcaccatctcagtctttatacagagaaatccatcagcttataagcttcaaagacgttcttcctgacaagaatcttctcccagactggtcttccaacaaaaacccgtgtactttcgatggcgttacttgcagagacgacaaagttacttcgattgatctcagctccaagcctctcaacgtcggattcagtgccgtgtcctcgtctctcctgtctctcaccggattagagtctctgtttctctcaaactcacacatcaatggctccgtttctggcttcaagtgctctgcttctttaaccagcttggatctatctagaaactctctttcgggtcctgtaacgactctaacaagccttggttcttgctccggtctgaagtttcttaacgtctcttccaatacacttgattttcccgggaaagtttcaggtgggttgaagctaaacagcttggaagttctggatctttctgcgaattcaatctccggtgctaacgtcgttggttgggttctctccgatgggtgtggagagttgaaacatttagcgattagcggaaacaaaatcagtggagacgtcgatgtttctcgctgcgtgaatctcgagtttctcgatgtttcctccaacaatttctccactgggattcctttcctcggagattgctctgctctgcaacatcttgacatctccgggaacaaattatccggcgatttctcccgtgctatctctacttgcacagagctcaagttgttgaacatctctagtaaccaattcgtcggaccaatccctccgctaccgcttaaaagtctccaatacctctctctggccgagaacaaattcaccggcgagatccctgactttctctccggcgcgtgtgatacactcactggtctcgatctctctggaaatcatttctacggtgcggttcctccattcttcggttcatgttctcttctcgaatcactcgcgttgtcgagtaacaacttctctggcgagttaccgatggatacgttgttgaagatgagaggactcaaagtacttgatctgtctttcaacgagttttccggcgaattaccggaatctctgacgaatctatccgcttcgttgctaacgttagatctcagctccaacaatttctccggtccgattctcccaaatctctgccagaaccctaaaaacactctgcaggagctttaccttcagaacaatggcttcaccgggaagattccaccgactttaagcaactgttctgagctggtttcgcttcacttgagcttcaattacctctccgggacaatcccttcgagcttaggctctctatcgaagcttcgagatctgaaactatggctgaatatgttagaaggagagatccctcaggagctcatgtatgtcaagaccttagagactctgatcctcgacttcaacgatttaaccggtgaaatcccttccggtttaagtaactgtaccaatcttaactggatttctctgtcgaataaccggttaaccggtgagattccgaaatggattggccggttagagaatctcgctatcctcaagctaagcaacaattcattctccgggaacattccggctgagctcggcgactgcagaagcttaatctggcttgatctcaacaccaatctcttcaatggaacgattccggcggcgatgtttaaacaatccgggaaaatcgctgccaatttcatcgccggtaagaggtacgtttatatcaaaaacgatgggatgaagaaagagtgtcatggagctggtaatttacttgagtttcaaggaatcagatccgaacaattaaaccggctttcaacgaggaacccttgtaatatcactagcagagtctatggaggtcacacttcgccgacgtttgataacaatggttcgatgatgtttctggacatgtcttacaacatgttgtctggatacataccgaaggagattggttcgatgccttatctgtttattctcaatttgggtcataacgatatctctggttcgattcctgatgaggtaggtgatctaagaggtttaaacattcttgatctttcaagcaataagctcgatgggaggattcctcaggctatgtcagctcttactatgcttacggaaatcgatttgtcgaataataatttgtctggtccgattcctgagatgggtcagtttgagacttttccaccggctaagttcttgaacaatcctggtctctgtggttatcctcttccgcggtgtgatccttcaaatgcagacggttatgctcatcatcagagatctcatggaaggagaccagcgtcccttgctggtagtgtggcgatgggattgttgttctcttttgtgtgtatatttgggctgatccttgttggtagagagatgaggaagagacggagaaagaaagaggcggagttggagatgtatgcggaaggacatggaaactctggcgatagaactgctaacaacaccaattggaagctgactggtgtgaaagaagccttgagtatcaatcttgctgctttcgagaagccattgcggaagctcacgtttgcggatcttcttcaggctaccaatggtttccataatgatagtctgattggttctggtgggtttggagatgtttacaaagcgattttgaaagatggaagcgcggtggctatcaagaaactgattcatgttagcggtcaaggtgatagagagttcatggcggagatggaaaccattgggaagatcaaacatcgaaatcttgtgcctcttcttggttattgcaaagttggagacgagcggcttcttgtgtatgagtttatgaagtatggaagtttagaagatgttttgcacgaccccaagaaagctggggtgaaactaaactggtccacacggcggaagattgcgataggatcagctagagggcttgctttccttcaccacaactgcagtccgcatatcatccacagagacatgaaatccagtaatgtgttgcttgatgagaatttggaagctcgggtttcagattttggcatggcgaggctgatgagtgcgatggatacgcatttaagcgtcagtacattagctggtacaccgggttacgttcctccagagtattaccaaagtttcaggtgttcaacaaaaggagacgtttatagttacggtgtggtcttactcgagctactcacgggtaaacggccaacggattcaccggattttggagataacaaccttgttggatgggtgaaacagcacgcaaaactgcggattagcgatgtgtttgaccccgagcttatgaaggaagatccagcattagagatcgaacttttacaacatttaaaagttgcggttgcgtgtttggatgatcgggcttggagacgaccgacaatggtacaagtcatggccatgtttaaggagatacaagccgggtcagggatagattcacagtcaacgatcagatcaatagaggatggagggttcagtacaatagagatggttgatatgagtataaaagaagttcctgaaggaaaattatga

SEQ ID NO: 403 - protein, 1024 aa, Arabidopsis thaliana
  misc_feature (1)..(1024): Ceres CDNA ID no. 1821568
  misc_feature (1)..(1024): Also Known As  Ceres SEEDLINE ME06460
  misc_feature (292)..(315): Pfam Name: LRR_2 Pfam Description: Leucine Rich Repeat
  misc_feature (366)..(389): Pfam Name: LRR_1 Pfam Description: Leucine Rich Repeat
  misc_feature (883)..(1021): Pfam Name: Pkinase_Tyr Pfam Description: Protein tyrosine kinase
  misc_feature: Phenotype: Misc. Dwarf Useful for decreasing plant size
  misc_feature: Phenotype: Dark Green Useful for increasing chlorophyll and photosynthetic capacity
  misc_feature: Phenotype: Curled 5 Useful for making plants with altered leaf shape e.g., curled leaves
  misc_feature: Phenotype: Short Petioles Useful for making smaller plants
MKTFSSFFLSVTTLFFFSFFSLSFQASPSQSLYREIHQLISFKDVLPDKNLLPDWSSNKNPCTFDGVTCRDDKVTSIDLSSKPLNVGFSAVSSSLLSLTGLESLFLSNSHINGSVSGFKCSASLTSLDLSRNSLSGPVTTLTSLGSCSGLKFLNVSSNTLDFPGKVSGGLKLNSLEVLDLSANSISGANVVGWVLSDGCGELKHLAISGNKISGDVDVSRCVNLEFLDVSSNNFSTGIPFLGDCSALQHLDISGNKLSGDFSRAISTCTELKLLNISSNQFVGPIPPLPLKSLQYLSLAENKFTGEIPDFLSGACDTLTGLDLSGNHFYGAVPPFFGSCSLLESLALSSNNFSGELPMDTLLKMRGLKVLDLSFNEFSGELPESLTNLSASLLTLDLSSNNFSGPILPNLCQNPKNTLQELYLQNNGFTGKIPPTLSNCSELVSLHLSFNYLSGTIPSSLGSLSKLRDLKLWLNMLEGEIPQELMYVKTLETLILDFNDLTGEIPSGLSNCTNLNWISLSNNRLTGEIPKWIGRLENLAILKLSNNSFSGNIPAELGDCRSLIWLDLNTNLFNGTIPAAMFKQSGKIAANFIAGKRYVYIKNDGMKKECHGAGNLLEFQGIRSEQLNRLSTRNPCNITSRVYGGHTSPTFDNNGSMMFLDMSYNMLSGYIPKEIGSMPYLFILNLGHNDISGSIPDEVGDLRGLNILDLSSNKLDGRIPQAMSALTMLTEIDLSNNNLSGPIPEMGQFETFPPAKFLNNPGLCGYPLPRCDPSNADGYAHHQRSHGRRPASLAGSVAMGLLFSFVCIFGLILVGREMRKRRRKKEAELEMYAEGHGNSGDRTANNTNWKLTGVKEALSINLAAFEKPLRKLTFADLLQATNGFHNDSLIGSGGFGDVYKAILKDGSAVAIKKLIHVSGQGDREFMAEMETIGKIKHRNLVPLLGYCKVGDERLLVYEFMKYGSLEDVLHDPKKAGVKLNWSTRRKIAIGSARGLAFLHHNCSPHIIHRDMKSSNVLLDENLEAR

SEQ ID NO: 404 - DNA, 1792 bp, Arabidopsis thaliana
  misc_feature (1)..(1792): Ceres CDNA ID no. 12336276
  misc_feature (1)..(1792): Also Known As  Ceres SEEDLINE ME07624
  misc_feature (1)..(1792): Also Known As  Ceres CLONE ID no. 158108
aaatacagagcagaaacctttaagagaagatctaataagaaagaagaggaaaaaaaaggatggttttctcagtttccatttttgcctctctcgctccgtacttagtctctgcgttactactcttctttctcatcgagcagctctcttacctcgtcaagaaacgtaacctccctggtcctctctttgtccctccgatcatcggaaacgccatttcactcgtccgtgatcctacttccttctggttcaagcaatccgacacggcaggcacttcccctggcctcgctgctaactacctcatcggcaaattcatcatctacatcagagacacagagctttctcatcaaatattctccaacgttcgtcttgaagcttttcaccctctaggacatccttttggcaaacaactattcggtgatcatagcctaatctacttgtttggtgaggatcacaaaactgttcgccgtcaccttgctcctaacttcacccccaaggcactctccacttactctgatctccaacaaatagttatgctccgtcatctacgacagtgggaggaaagtttctccggcggaactaagccggtttctatgcgagaccttgtccgtgaactcaatcttgagacttctcaaacggttttcgttggaccctaccttgacaaggaagctaggaacacgttctgtactgattacaatctgttcaatctcggatctatggcgctcccgatcaacctgcccggctttgcgttcaacaaggctcgccgggcggtaatgaacctggagaagacgctctccgtctgtgcgggaaaatccaaaaagaggatggctacaggagaggagccaacatgcttaatcgatttttggatgcatgcattcgtcacggagatagaatccggtaatccaccgccgcttcactccgaagacgaagccatcggcggtttgctcttcgattttctctttgccgcacaagacgcgtcgacgtcatcactcctttgggcggtgacgtttctagaatctcatccgaaagtgctgagcaaagtgagggaggaagtggccaagatttggtcacctcagtctggccatctgatcacggccgatcagctcgcggagatgaagtatactcgcgctgtggcacgtgaggtggtgagatatcgaccaccggcaactatggtcccacacattgctactaatgatttccctcttacagaatcgtacactatcccaaaaggtacaatagtgtttccctcggttttcgacgcctcgtttcaagggtttactgaaccgaaccggttcgatccggaccggtttagtgagacaaggcaagaggatcaagtgttcaaacgaaactacctagcttttggatggggtgcacaccaatgcgtaggccagcgttacgcattgaaccacctcgtgctcttcatcgctatgttctcatcgttgtttgatttcaagagacttcaatcggacggttgcgatgacatcatatactgtcccacgatatcgccaaaggacgggtgcacggtgttcttgtctaagcgcatcgtaacgtatccgaacctctgatttggatttttgttacaaattattggtgatcaaagtcaatactcatgagtgtgattactattattgttgttcgtgatcgtgatgtgtctcgtgaggtgagttccactagagcgttatgtcttgttgaatttgagaagtcattgttttgccattaatctgtactgtcttattttgtttggaccccagtgattctataacgtgtttcatgtattttatgtcattttctctaaaac

SEQ ID NO: 405 - protein, 499 aa, Arabidopsis thaliana
  misc_feature (1)..(499): Ceres CDNA ID no. 12336276
  misc_feature (1)..(499): Also Known As  Ceres SEEDLINE ME07624
  misc_feature (1)..(499): Also Known As  Ceres CLONE ID no. 158108
  misc_feature (38)..(487): Pfam Name: p450 Pfam Description: Cytochrome P450
  misc_feature: Phenotype: Dark Green Useful for increasing chlorophyll and photosynthetic capacity
MVFSVSIFASLAPYLVSALLLFFLIEQLSYLVKKRNLPGPLFVPPIIGNAISLVRDPTSFWFKQSDTAGTSPGLAANYLIGKFIIYIRDTELSHQIFSNVRLEAFHPLGHPFGKQLFGDHSLIYLFGEDHKTVRRHLAPNFTPKALSTYSDLQQIVMLRHLRQWEESFSGGTKPVSMRDLVRELNLETSQTVFVGPYLDKEARNTFCTDYNLFNLGSMALPINLPGFAFNKARRAVMNLEKTLSVCAGKSKKRMATGEEPTCLIDFWMHAFVTEIESGNPPPLHSEDEAIGGLLFDFLFAAQDASTSSLLWAVTFLESHPKVLSKVREEVAKIWSPQSGHLITADQLAEMKYTRAVAREVVRYRPPATMVPHIATNDFPLTESYTIPKGTIVFPSVFDASFQGFTEPNRFDPDRFSETRQEDQVFKRNYLAFGWGAHQCVGQRYALNHLVLFIAMFSSLFDFKRLQSDGCDDIIYCPTISPKDGCTVFLSKRIVTYPNL

SEQ ID NO: 406 - protein, 495 aa, Arabidopsis thaliana
  misc_feature (1)..(495): Public GI no. 34365731
  misc_feature (1)..(495)
  Functional Homolog of CDNA ID no. 12336276at SEQ ID no. 405with e-value of 0 and percent identity of 83.00
MVFSVSIFASLAPYLISAFLLFLLVEQLSYLFKKRNIPGPFFVPPIIGNAVALVRDPTSFWDKQSSTANISGLSANYLIGKFIVYIRDTELSHQIFSNVRPDAFHLIGHPFGKKLFGDHNLIYMFGEDHKSVRRQLAPNFTPKALSTYSALQQLVILRHLRQWEGSTSGGSRPVSLRQLVRELNLETSQTVFVGPYLDKEAKNRFRTDYNLFNLGSMALPIDLPGFAFGEARRAVKRLGETLGICAGKSKARMAAGEEPACLIDFWMQAIVAENPQPPHSGDEEIGGLLFDFLFAAQDASTSSLLWAVTLLDSEPEVLNRVREEVAKIWSPESNALITVDQLAEMKYTRSVAREVIRYRPPATMVPHVAAIDFPLTETYTIPKGTIVFPSVFDSSFQGFTEPDRFDPDRFSETRQEDQVFKRNFLAFGWGPHQCVGQRYALNHLVLFIAMFSSLLDFKRLRSDGCDEIVYCPTISPKDGCTVFLSRRVAKYPNFS

SEQ ID NO: 407 - protein, 508 aa, Oryza sativa subsp. japonica
  misc_feature (1)..(508): Public GI no. 34903888
  misc_feature (1)..(508)
  Functional Homolog of CDNA ID no. 12336276at SEQ ID no. 405with e-value of 0 and percent identity of 61.52
MAAVVDFLDLRAAAPFVVAALAFYFLVEQLSYHRKKGPLPGPPLVVPFVGSVAHMIRDPTGFWDAQAARARKSGAGLAADFLIGRFVVFIRDSELSHRVFANVRPDAFHLIGHPFGKKLFGDHNLIYMFGEDHKDLRRRIAPNFTPRALSTYAAIQQRVILSHLRRWLDRSAANGGKAEPIRVPCRDMNLETSQTVFAGPYLTKEAREKFERDYNFFNVGLMALPVDLPGFAFRSARLGVARLVRTLGECARASKARMRAGGEPECLVDFWMQETVREIDEAKAAGKPPPAHTDDEELGGFLFDFLFAAQDASTSSLCWAVSALDSHPDVLAGVRAEVASLWSPESGEPITAEKIAEMKYTQAVAREVVRHRPPATLVPHIAGEEFQLTEWYTIPKGTIVFPSVYESSFQGFPEPDTFDPERFFSEARREDVVYKRNFLAFGAGPHQCVGQRYALNHLVLFMALFVSVVDFRRDRTEGCDEPVYMPTIVPRDSCTVYLKQRCAKFPSF

SEQ ID NO: 408 - protein, 504 aa, Oryza sativa subsp. japonica
  misc_feature (1)..(504): Public GI no. 34903880
  misc_feature (1)..(504)
  Functional Homolog of CDNA ID no. 12336276at SEQ ID no. 405with e-value of 0 and percent identity of 59.55
MVDSLLYGLLDLRMAAPLLAAAVALYVLVEQLSYHRKKGSLPGPPLVVPFIGSATHMIRDPTGFWEMQAARARKSGVGFTADFLAGKFTIFIRDSELSNRVFANVRPDAFFVIGHPFGKKLFGDHNLIYLFGDDHKDLRRRMATNFTPRALSTYAAIQQRGIVSHLRRWLDRSAANGGKAEPIRVPCRDMNLETSQTVFAGPYLTEEARERFKSDYNLFNVGLLAFPVDLPGLAFRRARQAVARLVRMLRDCARESKARMRAGGEPECLVDYWMQETVREIDEAKAAGLPPPAHISDDEEIGGFLFDFLFAAQDASTSSLCWAVSALDSHPDVLARVRAEVASLWSPDSGEPITADKIAEMKYTKAVAREVVRHRPPATLMPHIALQNFQLTESYTIPKGTLVLPSMYESSFQGFHDPDAFDPERFFSEARREDVVYKRNFLAFGAGPHQCVGQRYALNHLVIFMALFVSLVDFRRERTEGCDVPVYMPTMVPRDGCVVYLKQR

SEQ ID NO: 409 - protein, 510 aa, Triticum aestivum
  misc_feature (1)..(510): Ceres CLONE ID no. 820398
  misc_feature (1)..(510)
  Functional Homolog of CDNA ID no. 12336276at SEQ ID no. 405with e-value of 2E-22 and percent identity of 54.74
MAELLRAADFFDLRAAAPFVAAAVALYFLAEQLSYLRKKGPLPGPSLVVPFLGSAVRMIRDPTGFWDVQAARARESGAGLAADFLFGRFIVFIRDSELSHRVFANVRPDAFHLIGHPFGKKLFGDHNLIYMFGEDHKDLRRRITPNFTPRALSTYAAIQQRVILAHLRRWLDQSAATGEAMPIRVPCRDMNLETSQTVFVGSYLTEKARERFAKDYALFNLGLMTVPVDLPGFAFRRARLAVARLVRTLGECARKSKARMRAGGEPECLVDYWMQETLREMDEAAAAGRPPLAHTDDEEFGGFLFDFLFAAQDASTSSLCWAVSALDSHPDVLARVRAEVATVWSPESGKPITAEKIQAMKYTQAVAREVVRYRPPATLVTHVAGEPFQLTEWYTVPKGAIVFPSVYESSFQGFTSPDAFDPERFFSEARREDVACKRNFLAFGAGAHQCVGQRYALNHLVLFLALFVTVADFRRDRTAGCDEPVYMPTIVPRDGCAVYMEQRCDTFPSF

SEQ ID NO: 410 - protein, 511 aa, Oryza sativa subsp. japonica
  misc_feature (1)..(511): Public GI no. 34903874
  misc_feature (1)..(511)
  Functional Homolog of CDNA ID no. 12336276at SEQ ID no. 405with e-value of 0 and percent identity of 58.33
MRTSTDPSGSIESFHGLVHLRTAAPLLAAAVALYMLIEQLSYHRKKGSMPGAPLVVPFLGSAAHLIRDPVGFWDVQAALARKSGAGLAADFLFGRFTVFIRDSELSHRVFANVRADAFHVVSHPFGKKLFGEHNLVYLVGEEHKDLRRRIAPNFTPRALSTYAVIQQRVIISHLRRWLDRSASNGGKAEPIRVPCRDMNLETSQTVFVGPYLTEKARERFDRDYNLFNVGFITLPVDLPGFAFRRARLAGARLMHTLGDCARQSRQRMLGGGEPECLLDYLMQETVREIDEATAAGLPPPPHTSDVEVGALLFGFLFAAQDASTSSLCWAVSALDSHPNVLARVRAEVAALWSPESGEPITAEMMSAMKYTQAVAREVVRYHPPATLVPHIAVEAFQLTAQYTIPKGTMVFPSVYESSFQGFQDADAFDPDRFFSEARREDVVYKRNFLAFGAGPHQCVGQRYALNHLVIFMALFVSLVDFRRERTEGCDVPVYMPTMVPRDGCVVYLKQR

SEQ ID NO: 411 - protein, 512 aa, Oryza sativa subsp. japonica
  misc_feature (1)..(512): Public GI no. 34903876
  misc_feature (1)..(512)
  Functional Homolog of CDNA ID no. 12336276at SEQ ID no. 405with e-value of 0 and percent identity of 58.52
MVESFHGLVVVDLRTAAPLLATAVALYILIEQLSYHRKKGSMPGPPLVVVPFLGSVTHLFRDPVGFWDLQATRASKSGAGLTADFLFGRLMVFIRDSELSRRVFANVRADAFHLVGHPFGKKLFGDHNLIYMVGKEHKDLRRRIAPNFTPRALSTYAVIQQRVILSHLRRWIDRSVANGGKAEPIRVPCRDMNLETSQTVFVGPYLTVETRERFDRDYNLFNHGFITLPIDLPGSAFRRARLAVPRLKHILEDCARQSKQRMRGGGEPECLVDYLMQETVREIDEAAAAGLPPPPHTSDMETGNLLFDFLFAAQDASTSSLCWAVSALDSHPDVLARVRAEVAALWSPESGEPITAEMMTEMKYTQAVAREVVRYWPPGPVVPHIAGEAFQLTEQYTIPKGTIVFPSVYESSFQGFPDAGTFDPERFFSEARREDVVYKRNFLAFGAGPHQCVGQRYALNHLVIFMALLASLIDFRRERTEGCDVPVYMPTIVPRDGCVVHLKQRCAKLPSF

SEQ ID NO: 412 - protein, 511 aa, Triticum aestivum
  misc_feature (1)..(511): Ceres CLONE ID no. 779326
  misc_feature (1)..(511)
  Functional Homolog of CDNA ID no. 12336276at SEQ ID no. 405with e-value of 0 and percent identity of 57.55
MELLPVPLGVGFMGYVRAAAPLVAAAVAFYFLVEQLSYHRNKGVLPGPSLVVPFLGSIVPMIRDPTGFWEVQAARARDSGAGLAADFLVGRFILFVRDSELSHRVFANVRPDAFHFVGHPFGKKLFGEHNFIYLFGDEHKDLRRRMAPTFTPRALSTYAAIQQRIVLAHIRRLLDETSPATPAPIRVACRDMNLETSQTVFVGPYLTQEARARFGEDYAVFNVGVIALPVDLPGFAFRRARLAVGRLVRTLAECVGQSKARMRAGGEPECLVDYWMQGLVKEMDEAAAAGRPLPKHTADEDLGGYLFDFLFAAQDASTSSLCWAVAALGSHPDVVARMRAEVSAVWSPESGEPITPDKFMQLKYTHAVAREVVRYRPPATLVPHIAAEPFKLTEWYTVPKGAIVFPSVYESSFQGFTEAEAFDPDRFFSEARREDEAFKRNFLAFGAGAHQCIGQRYALNHLALFLALFVSVVHFKRHTTHGCDEPVYMPTIVPKDDCTVYLHQRCSSFSF

SEQ ID NO: 413 - DNA, 1083 bp, Arabidopsis thaliana
  misc_feature (1)..(1083): Ceres CDNA ID no. 2129031
  misc_feature (1)..(1083): Also Known As  Ceres SEEDLINE ME07647
atgagatcaggagaatgtgatgaagaggagattcaagcaaagcaagaaagagatcaaaatcaaaatcatcaagtaaacttaaaccacatgttgcaacaacaacagccgagttcggtatcatcttcaaggcaatggacttcagcttttaggaatccaagaatcgttcgagtctcaagaacattcggtggcaaagacagacacagcaaagtatgtacagtccgtggtcttcgagaccggaggataaggttgtccgtacctacagctattcaactctacgaccttcaagatcgattagggctgagtcagccaagcaaagtcattgattggttactcgaagcagcaaaagatgacgtagacaagctacctcctctacaattcccacatggatttaaccagatgtatccaaatctcatcttcggaaactccgggtttggagaatctccatcttcaactacatcaacaacgtttccaggaaccaatctcgggttcttggaaaattgggatcttggtggttcttcaagaacaagagcaagattaaccgatacaactacgacccaaagagaaagttttgatcttgataaaggaaaatggatcaaaaacgacgagaatagtaatcaagatcatcaagggtttaacaccaatcatcaacaacaatttcctctgaccaatccgtacaacaacacttcagcttattacaaccttggacatcttcaacaatcgttagaccaatctggtaataacgttactgtcgcaatatctaatgttgctgctaataataacaataatctcaatttgcatcctccttcctcgtctgccggagatggatctcagctttttttcggtcctactcctccggcaatgagctctctattcccgacatacccttcgtttcttggagcttctcatcatcatcatgtcgtcgatggagccggtcatcttcagctctttagctcgaattcaaataccgcatcgcagcaacacatgatgccgggtaatacgagtttgattagaccatttcatcatttgatgagctcgaatcatgatacggatcatcatagtagcgataatgaatcagattcttga

SEQ ID NO: 414 - protein, 360 aa, Arabidopsis thaliana
  misc_feature (1)..(360): Ceres CDNA ID no. 2129031
  misc_feature (1)..(360): Also Known As  Ceres SEEDLINE ME07647
  misc_feature (47)..(257): Pfam Name: TCP Pfam Description: TCP family transcription factor
  misc_feature: Phenotype: Corkscrew Useful for making plants with altered leaf shape e.g., curled leaves
  misc_feature: Phenotype: Lanceolate Shaped Useful for making plants with increased biomass and foliage
MRSGECDEEEIQAKQERDQNQNHQVNLNHMLQQQQPSSVSSSRQWTSAFRNPRIVRVSRTFGGKDRHSKVCTVRGLRDRRIRLSVPTAIQLYDLQDRLGLSQPSKVIDWLLEAAKDDVDKLPPLQFPHGFNQMYPNLIFGNSGFGESPSSTTSTTFPGTNLGFLENWDLGGSSRTRARLTDTTTTQRESFDLDKGKWIKNDENSNQDHQGFNTNHQQQFPLTNPYNNTSAYYNLGHLQQSLDQSGNNVTVAISNVAANNNNNLNLHPPSSSAGDGSQLFFGPTPPAMSSLFPTYPSFLGASHHHHVVDGAGHLQLFSSNSNTASQQHMMPGNTSLIRPFHHLMSSNHDTDHHSSDNESDS

SEQ ID NO: 415 - DNA, 1269 bp, Arabidopsis thaliana
  misc_feature (1)..(1269): Ceres CDNA ID no. 1807504
  misc_feature (1)..(1269): Also Known As  Ceres SEEDLINE ME07648
ttctctcttccattttctccaactatataaaaaaaaaaaagtgagagagagagcaaatctgtgtgatggaagttgctcttgagtttgggattatttatcttttcaatatcatttgatgaagaaggatggtgagatgggaagaagtgatgtcaggaggagtaggagatgaaagagagacaacgttggagtggtgaagaagatgcattgttacgtgcttacgttagacagttcggtccgagagaatggcatcttgtgtctgagcgtatgaacaaacctttgaaccgtgacgccaagtcttgtttagagagatggaagaattatcttaagccagggatcaagaaagggtctttgacagaggaagagcagaggcttgtgatccgtcttcaggagaaacacggcaacaagtggaagaagattgctgctgaggttcccgggaggacggcaaagcggttagggaagtggtgggaagtgtttaaggagaagcaacagagagaagagaaagagagtaacaagagagttgagcctattgacgagagtaagtacgatcggattctcgagagtttcgctgagaagcttgtcaaagagcggtctaacgttgtccctgctgctgccgctgctgcaacggttgtgatggctaattcgaatggagggtttttacattctgaacaacaagttcagcctcctaacccagtgatcccgccttggttagctacttctaacaatgggaacaatgttgttgcaaggcctccctcggtaactttgacattatcgccttccacagtggctgcagctgcgcctcaaccgccaatcccgtggctgcagcagcaacagcctgagagagcagagaacggtccagggggacttgtgttagggagtatgatgccgtcttgtagtgggagtagcgagagtgtgttcttgtcagagcttgtggagtgttgtagagagttggaggaagggcaccgagcttgggcagaccataagaaagaggctgcatggaggctaagaaggctggagctgcagctagagtcagagaagacgtgtagacaaagggagaagatggaggagattgaggcaaagatgaaagctcttagggaagagcagaagaacgcaatggagaagatcgaaggagagtacagagaacagctcgttggtttgaggcgagacgcagaggccaaagaccagaaactggctgatcaatggacctctaggcatatcagactcaccaagtttcttgaacaacaaatgggttgcagattagaccgcccctga

SEQ ID NO: 416 - protein, 367 aa, Arabidopsis thaliana
  misc_feature (1)..(367): Ceres CDNA ID no. 1807504
  misc_feature (1)..(367): Also Known As  Ceres SEEDLINE ME07648
  misc_feature (4)..(53): Pfam Name: Myb_DNA-binding Pfam Description: Myb-like DNA-binding domain
  misc_feature: Phenotype: Long Petioles Useful for making plants that grow better in shade
  misc_feature: Phenotype: Lanceolate Shaped Useful for making plants with increased biomass and foliage
MKERQRWSGEEDALLRAYVRQFGPREWHLVSERMNKPLNRDAKSCLERWKNYLKPGIKKGSLTEEEQRLVIRLQEKHGNKWKKIAAEVPGRTAKRLGKWWEVFKEKQQREEKESNKRVEPIDESKYDRILESFAEKLVKERSNVVPAAAAAATVVMANSNGGFLHSEQQVQPPNPVIPPWLATSNNGNNVVARPPSVTLTLSPSTVAAAAPQPPIPWLQQQQPERAENGPGGLVLGSMMPSCSGSSESVFLSELVECCRELEEGHRAWADHKKEAAWRLRRLELQLESEKTCRQREKMEEIEAKMKALREEQKNAMEKIEGEYREQLVGLRRDAEAKDQKLADQWTSRHIRLTKFLEQQMGCRLDRP

SEQ ID NO: 417 - protein, 334 aa, Medicago truncatula
  misc_feature (1)..(334): Public GI no. 14719883
  misc_feature (1)..(334)
  Functional Homolog of CDNA ID no. 1807504at SEQ ID no. 416with e-value of 9.8E-117 and percent identity of 73.62
MSDMKDRQRWRAEEDALLRAYVKQYGPREWNLVSQRMNTPLNRDAKSCLERWKNYLKPGIKKGSLTEEEQRLVISLQATHGNKWKKIAAQVPGRTAKRLGKWWEVFKEKQQRETKGSINRTVDPINDSKYEHILESFAEKLVKERPSPSFVMAASNSSYLHTDAQAPTPGLLPSWLSNSNNAAPVRPNSPSVTLSLSPSTVAAPPPWMQPVRGPDNAPLVLGNVAPHGAVLSYGESMVMSELVDCCKELEEVHHALAAHKKEAAWRLSRVELQLESEKASRRREKMEEIEAKIKALREEQAVALDRIEGEYREQLAGLRRDAETKEQKLAEQWA

SEQ ID NO: 418 - protein, 363 aa, Nicotiana tabacum
  misc_feature (1)..(363): Public GI no. 45504723
  misc_feature (1)..(363)
  Functional Homolog of CDNA ID no. 1807504at SEQ ID no. 416with e-value of 3E-131 and percent identity of 73.22
MRERQRWRSEEDALLRAYVKQYGPKEWHLVSQRMNTALNRDAKSCLERWKNYLKPGIKKGSLTQEEQRLVIHLQAKHGNKWKKIAAEVPGRTAKRLGKWWEVFKEKQHREQKENNKVVDPVDEGKYDHILETFAEKIVKERSVPGLLMATSNGGFLHADAPAPSPQTLLPPWLSNSTATSTVRSPSPSVTLSLSPSTVPPTPTPTPGIPWLQTDRGPENAPLILSSFPHHGVAPPCGENPFVTELVECCKELDEGHRAWAAHKKEAAWRLRRVELQLESEKICKVREKMEEIEAKMKALREEQKATLDRIEAEYKEQLAGLRRDAEAKEQKLAEQWASKHLRLSKFLEQMGCQSRLAEPNGGR

SEQ ID NO: 419 - protein, 359 aa, Pisum sativum
  misc_feature (1)..(359): Public GI no. 9972157
  misc_feature (1)..(359)
  Functional Homolog of CDNA ID no. 1807504at SEQ ID no. 416with e-value of 2.3E-124 and percent identity of 73.18
MSLEMKDRQRWRAEEDALLRAYVKQYGPREWNLVSQRMNTPLNRDAKSCLERWKNYLKPGIKKGSLTEEEQHLVISLQATHGNKWKKIAAQVPGRTAKRLGKWWEVFKEKQQRETKGINKTVDPINDSKYEHILESFAEKLVKERPSPSFVMAASNSSYLHTDAQAATPGLLPSWLSNSNNTAPVRPNSPSVTLSLSPSTVAAPPPWMQPVRGPDNAPLVLGNVAPHGAVLSYGENMVMSELIDCCKELEEGHHALAAHKKEAAWRLSRVELQLESEKASRRREKMEEIEAKIKALREEQAVALDRIEGEYREQLAGLRRDAEAKEQKLAEQWAAKHLRLTKFLEQVGCRSRHAEQNGR

SEQ ID NO: 420 - protein, 360 aa, Lycopersicon esculentum
  misc_feature (1)..(360): Public GI no. 5230656
  misc_feature (1)..(360)
  Functional Homolog of CDNA ID no. 1807504at SEQ ID no. 416with e-value of 3.4E-130 and percent identity of 71.67
MRERQRWRAEEDALLRAYVRQYGPKEWPLVSQRMNTPLNRDAKSCLERWKNYLKPGIKKGSLTEDEQRLVIQLQAKHGNKWKKIAAEVPGRTAKRLGKWWEVFKEKQQREQKENNKVVDPVDEGKYDHILETFAEKIVKERSVPGLLMATSNGGFLHADASTPTPQTLLPPWLSNSSAPSTVRSSSPSVTLSLSPSTVPPTPTPGIPWLQTDRGPDNAPLILSSFPHHSVAPCGENPFITELAECCKDLDEGHRTWTAHKKEAAWRLRRVELQLESEKASKVREKMEEIEAKMKALREEQKATLDRIEAEYKEQLAGLRRDAEAKEQKLAEQWTSKHMRLAKFLEQMGCQSRLAEPNGGR

SEQ ID NO: 421 - protein, 361 aa, Glycine max
  misc_feature (1)..(361): Public GI no. 60476424
  misc_feature (1)..(361)
  Functional Homolog of CDNA ID no. 1807504at SEQ ID no. 416with e-value of 1.6E-123 and percent identity of 70.20
MKDRQRWRAEEDALLRAYVKQYGPREWNLVSQRMNTPLNRDAKSCLERWKNYLKPGIKKGSLTEEEQRLVINLQATHGNKWKKIAAQVPGRTAKRLGKWWEVFKEKQQRETKGNSCTIDPISDSKYEHILESFAEKLVKERPSTSTSTSFVMATSNSSFLHADAPAPAPALLPSWLSNSNGTAPVRPPSPSVTLSLSPSTVAAPPPWMQPPVRGQDNASPLVLGNVAPHGAVLAFGENMVMSELVECCKELDEVHHALAGHKKEAAWRLSRVELQLESEKAGRRREKMEEIEAKIKALREEQTAALDRIEAEYREQLAGLRRDAESKEQKLAEQWAAKHLRLTKFLEQVGCRSRLTEPNGR

SEQ ID NO: 422 - protein, 356 aa, Lotus japonicus
  misc_feature (1)..(356): Public GI no. 60476408
  misc_feature (1)..(356)
  Functional Homolog of CDNA ID no. 1807504at SEQ ID no. 416with e-value of 1.2E-118 and percent identity of 70.18
MKERQRWTSEEDALLCAYVKQYGPREWHLVSQRMNTTLHRDAKSCLERWKNYLKPGIKKGSLTEEEQRLVIRLQAKHGNKWKKIAAEVPGRTAKRLGKWWEVFKEKQQREKQEISKSIGPVDDSKYDHILETFAEKLVKEHPSPSYLMAASNGPFLHTDTPAATPASALLPPWLSNSSNNPATAGQPPSPSVTLSLSPSTVAGPPPPWRGLENNALAMANTAPHGTVPAFSDNMLVSELVDCCKELEEVHGALAAHKKEATWRLRRVELQLESEKANRRREKIEETEAKIKALREQQNAALERIEAEYREQLAGLRRDAETKEQKLAEQWTVKHSRLMKFMEQIGCRSRIAETNGR

SEQ ID NO: 423 - protein, 360 aa, Eschscholzia californica subsp. californica
  misc_feature (1)..(360): Public GI no. 30314006
  misc_feature (1)..(360)
  Functional Homolog of CDNA ID no. 1807504at SEQ ID no. 416with e-value of 6.1E-124 and percent identity of 70.03
MKERQRWRAEEDALLRAYVKQYGPREWNLVSQRMNTHLDRDAKSCLERWKNYLKPGIKKGSLTEEEQRLVIRLQAKHGNKWKKIAAEVPGRTAKRLGKWWEVFKEKQQREQKETSKTIDPIEEGKYDQILETFAEKLVKERPNPPLYMGTSNGGYLQSNAATVPPPTLLPPWLSSSSAPPTTSSPPSVTLTLSPSTIAPCTSMSWLQPDRGGNDSNPSLVLGNFPPTHVPVPPSGGDRLMVPDLVECCRELEESHRALVAHKKEAAWRLKRVELQLESEKACRRREKMEEIEMKVRALREEQKVTLDRMEADYRDQLAGLRRDAEAKEQKLADQWAAKHLRLMKFLEQIGCRPPSEPSGR

SEQ ID NO: 424 - protein, 357 aa, Antirrhinum majus
  misc_feature (1)..(357): Public GI no. 3183617
  misc_feature (1)..(357)
  Functional Homolog of CDNA ID no. 1807504at SEQ ID no. 416with e-value of 5.5E-123 and percent identity of 69.68
MKERQRWRPEEDALLRAYVKEYGPRDWHLVTQRMNKPLNRDAKSCLERWKNYLKPGIKKESLTQEEQILVINLQAKHGNKWKKIAAEVPGRTAKRLGKWWEVFKEKKQREEKDNKKITEPIEEGKYDRILETFAEKIVKERVVSRIITMPPTSNSGFLQNDPSPHSAQSVLPPWLASSSMTTTIRPQSPSVTLSLSPSVVPPAPAIPWLHPDNTTHGPSNLSSLGVVAPFMGENHIVPELLECCRELEEGQRAWAAHRKEAAWRLKRVELQLESEKACRRREKMEEIEAKMKALREEQKASLDRIEAEYREQLAGLRREAEVKEQKLAEQWAAKHLRLTKFLEQTGYRSIAGELNGR

SEQ ID NO: 425 - protein, 357 aa, Glycine max
  misc_feature (1)..(357): Public GI no. 60476426
  misc_feature (1)..(357)
  Functional Homolog of CDNA ID no. 1807504at SEQ ID no. 416with e-value of 4.5E-112 and percent identity of 67.93
MKERQRWRAEEDALLRSYVKQYGPREWNLVSQRMNTYLNRDAKSCLERWKNYLKPGIKKGSLTEEEQRLVIHLQAKYGNKWKKIAAEVPGRTAKRLGKWWEVFKEKQQREKKEINRIADPINNSKYEHILESFAEKLVKERPSPSFVMAASDGAFLLTDTPAPASSLRPSWLSNSSSAAAIGPSSLSVKLSLSSSTVATPPFSWLPPERGPDNAPFVLGNVSALHGAIPTLSDSMHMSQMVEHCKELEEGHRALATHKKEAAWRLSRVELQLESEKANRRREKIEEFEAKIKALQEEEKAALGRIEAEYREQLAALRRDAENKEQKLAEQWDAKHLRFTRLLEQLGCRAGLLEPNAR

SEQ ID NO: 426 - protein, 341 aa, Lotus japonicus
  misc_feature (1)..(341): Public GI no. 60476410
  misc_feature (1)..(341)
  Functional Homolog of CDNA ID no. 1807504at SEQ ID no. 416with e-value of 4.6E-103 and percent identity of 67.27
MKERQRWSSEEDALLHAYVQQYGPREWNLVSQRMNTPLNRDTKSCLERWKNYLKPGIKKGSLTKEEQRLVILLQANYGNKWKKIAAEVPGRTAKRLGKWWEVYKEKQQREKIEINGIVSPISDTKYEHMLEGFAEKLVKEHTLPSFAMAASSNEAFLHTNSSAMLPSWLSNYDSTSTPPSSISVTLSLSPSTVATPRGLENNAPFVLRNVTAHNGSVPSFSDHILMSELVGFSKELEEGHRALAAHKKEAEWRLRRLELQLESEKACRRRETVEEFEANIKALQEEQTAALNRIENACREQLGGLRRDAESKEQKLAEKWTSKHLRLTRLLEQMKIQTGAP

SEQ ID NO: 427 - DNA, 1383 bp, Arabidopsis thaliana
  misc_feature (1)..(1383): Ceres CDNA ID no. 3096137
  misc_feature (1)..(1383): Also Known As  Ceres SEEDLINE ME07740
atgacagttgttggagatgttgctccaattccaaggaggaacagttctacttgctctaatgatatcgctgctccgttattaccagagtgtcatggagatgaagttgctcatgatgaattcaatggagcttcttttagtggcgcggtttttaacctcgccacgactataattggtgctggtatcatggctttgcctgctacaatgaagattcttggacttggacttggaatcacgatgattgttgttatggctttcttgactgatgcgtcgattgagttcttgcttaggtttagtaaagctgggaagaatcgatcttacggtggtttaatgggtggttcttttggtaatcctggaaggattttgcttcaagtcgcggttttagttaataacatcggtgttttgattgtatacatgatcattataggtgatgtgttggctggaaagacggaagatggtatccatcatttcggtgttctcgaaggatggtttggtcaccattggtggaatggaagagctgctattcttctgattactactcttggtgtgtttgctccattggcttgcttcaagcgaatcgattctttgaaatttacatcggccttatccgtggctctggcggttgtgtttctcattattactgcgggaatttcaattatgaagttgatcagtggcggtgtggcgatgccaagattgttaccagatgttactgacttaacatctttctggaatctcttcacagtcgtacctgttcttgtcacagcattcatttgccattacaatgttcacagtatacagaacgagctcgaagacccctctcagataagacctgttgttcgatcagcacttatgctctgctcatctgtttacataatgacaagtattttcgggttcctcttgtttggtgatgatactcttgatgatgtccttgcaaactttgacactgatcttggaatcccttttggttctatccttaatgatgcggttcgagttagctacgcgcttcatttgatgctcgtgttcccgattgttttctaccctcttcggattaacattgacgggctcttgttcccttccgctcgatcattatctacctcaaatgtgaggttcggttgcctcactgccggtctcatctctgtaatcttcttgggtgcaaacttcatcccaagcatttgggatgctttccaattcactggagcaaccgccgctgtttgtctcggcttcatcttcccagcttctatcatactaaaggatcgtcatgacaaagcaacaaacagggacacaaccttagctattttcatgattgttcttgcggtattgtccaatgcaatcgccatttacagcgatgcttatgcgctattcaagaagaacgctcctcgtgagtaa

SEQ ID NO: 428 - protein, 460 aa, Arabidopsis thaliana
  misc_feature (1)..(460): Ceres CDNA ID no. 3096137
  misc_feature (1)..(460): Also Known As  Ceres SEEDLINE ME07740
  misc_feature (41)..(444): Pfam Name: Trp_Tyr_perm Pfam Description: Tryptophan/tyrosine permease family
  misc_feature: Phenotype: Oval Shaped Useful for making plants with increased biomass and foliage
  misc_feature: Phenotype: Serrate Margins Useful for making plants with increased biomass and foliage
  misc_feature: Phenotype: Short Petioles Useful for making smaller plants
MTVVGDVAPIPRRNSSTCSNDIAAPLLPECHGDEVAHDEFNGASFSGAVFNLATTIIGAGIMALPATMKILGLGLGITMIVVMAFLTDASIEFLLRFSKAGKNRSYGGLMGGSFGNPGRILLQVAVLVNNIGVLIVYMIIIGDVLAGKTEDGIHHFGVLEGWFGHHWWNGRAAILLITTLGVFAPLACFKRIDSLKFTSALSVALAVVFLIITAGISIMKLISGGVAMPRLLPDVTDLTSFWNLFTVVPVLVTAFICHYNVHSIQNELEDPSQIRPVVRSALMLCSSVYIMTSIFGFLLFGDDTLDDVLANFDTDLGIPFGSILNDAVRVSYALHLMLVFPIVFYPLRINIDGLLFPSARSLSTSNVRFGCLTAGLISVIFLGANFIPSIWDAFQFTGATAAVCLGFIFPASIILKDRHDKATNRDTTLAIFMIVLAVLSNAIAIYSDAYALFKKNAPRE

SEQ ID NO: 429 - DNA, 1383 bp, Populus balsamifera subsp. trichocarpa
  misc_feature (1)..(1383): Ceres GDNA ANNOT ID no. 1535623
atgacaactggaaatattgcttcgaagaaggagaggaaatcaaggaggaacaagccagtagatgagaatgctcccttattgcctaaaaggcaagaggatgttggttttgatgagtttaatggagcttcctttactggggctgtgttcaatttatcaactacaatagttggtgcaggaatcatggctttgcctgccaccatgaaagtgttaggccttgttcttggggtttccttgatcatcttcatggctttcttggcagaggcttcaattgagatgttgctaaggtttagcagggcagggaagtgtgcttcttatgggggacttatgggggatgcctttggaaagactggaaggattatgttgcaagttgctgttttaatcaataacgttggtgtactcattgtgtacatgattattattggtgatgtgctgtctggaacatcttcaagtggatcccaccatgcaggtgttcttgaaggttggttcggagaacactggtggaatgcgcgaacctttgttcttcttgtcacaacactttttgtattttctccactggcttgctttaagcgaattgattctttaagttatacatctgccttatcagtcgcgctagcagttgtatttcttatcatcactgtggggatcacaattgtcaagttgataaatggaagtatagcaatgcccagattgatgcccgatgtaacagacatgacatccttctggaaactcttcactacagtccctgttcttgtcactgcatatatctgccattacaatgttcacagcatagataatgaacttgaagactctactcagataaaaccagttgtgcgaacagcacttgccttatgctcatctgtgtacatgatgacaagcatctttgggttccttctatttggcgatgcaactcttgatgatgtgcttgccaactttgacaccaaccttggcattccttacagttctctgcttaatgatgctgttcgtgttagttatgctgctcatcttatgctagtatttccaattgtcttctttccattaagactcaacttggatggcctcctctttccctcagctcaaccttttcatcaggcaaacacgaggtttgcattagtcaccattgggcttattgctttaatcttcttgggtgcaaattgcattccaagcatctgggatgctttccaattcactggagcaactgctgcagtttgccttggtttcatttttcctgcttccatcactctcagggatcgccacaatatagcatcaaagagagacaagatcttatgtatttttatgattgcgcttgccgtcttctccaatggggtggccatatacagtgatgcctatgccttgataaaaaagaacccgtcgcctcgtgaatga

SEQ ID NO: 430 - protein, 400 aa, Populus balsamifera subsp. trichocarpa
  misc_feature (1)..(400): Ceres GDNA ANNOT ID no. 1535623
  misc_feature (1)..(400)
  Functional Homolog of CDNA ID no. 3096137at SEQ ID no. 428with e-value of 1.3E-163 and percent identity of 76.75
MALPATMKVLGLVLGVSLIIFMAFLAEASIEMLLRFSRAGKCASYGGLMGDAFGKTGRIMLQVAVLINNVGVLIVYMIIIGDVLSGTSSSGSHHAGVLEGWFGEHWWNARTFVLLVTTLFVFSPLACFKRIDSLSYTSALSVALAVVFLIITVGITIVKLINGSIAMPRLMPDVTDMTSFWKLFTTVPVLVTAYICHYNVHSIDNELEDSTQIKPVVRTALALCSSVYMMTSIFGFLLFGDATLDDVLANFDTNLGIPYSSLLNDAVRVSYAAHLMLVFPIVFFPLRLNLDGLLFPSAQPFHQANTRFALVTIGLIALIFLGANCIPSIWDAFQFTGATAAVCLGFIFPASITLRDRHNIASKRDKILCIFMIALAVFSNGVAIYSDAYALIKKNPSPRE

SEQ ID NO: 431 - DNA, 1506 bp, Populus balsamifera subsp. trichocarpa
  misc_feature (1)..(1506): Ceres GDNA ANNOT ID no. 1482129
atgacaactggaaatattgcttcgaagaaggagaggaaatcaaggaggaacaagccagtagatgagaatgctcccttattgcctaaaaggcaagaggatgttggttttgatgagtttaatggagcttcctttactggggctgtgttcaatttatcaactacaatagttggtgcaggaatcatggctttgcctgccaccatgaaagtgttaggccttgttcttggggtttccttgatcatcttcatggctttcttggcagaggcttcaattgagatgttgctaaggtttagcagggcagggaagtgtgcttcttatgggggacttatgggggatgcctttggaaagactggaaggattatgttgcaagttgctgttttaatcaataacgttggtgtactcattgtgtacatgattattattggtgatgtgctgtctggaacatcttcaagtggatcccaccatgcaggtgttcttgaaggttggttcggagaacactggtggaatgcgcgaacctttgttcttcttgtcacaacactttttgtattttctccactggcttgctttaagcgaattgtatttttggcaccttgcacagattctggtgatttggagtgctggcctgatggctactttactagtaggactttttttttcctcttcttagcaaaagagcaattttttgcaggaaactttccatattctttaagttatacatctgccttatcagtcgcgctagcagttgtatttcttatcatcactgtggggatcacaattgtcaagttgataaatggaagtatagcaatgcccagattgatgcccgatgtaacagacatgacatccttctggaaactcttcactacagtccctgttcttgtcactgcatatatctgccattacaatgttcacagcatagataatgaacttgaagactctactcagataaaaccagttgtgcgaacagcacttgccttatgctcatctgtgtacatgatgacaagcatctttgggttccttctatttggcgatgcaactcttgatgatgtgcttgccaactttgacaccaaccttggcattccttacagttctctgcttaatgatgctgttcgtgttagttatgctgctcatcttatgctagtatttccaattgtcttctttccattaagactcaacttggatggcctcctctttccctcagctcaaccttttcatcaggcaaacacgaggtttgcattagtcaccattgggcttattgctttaatcttcttgggtgcaaattgcattccaagcatctgggatgctttccaattcactggagcaactgctgcagtttgccttggtttcatttttcctgcttccatcactctcagggatcgccacaatatagcatcaaagagagacaagatcttatgtatttttatgattgcgcttgccgtcttctccaatggggtggccatatacagtgatgcctatgccttgataaaaaagaacccgtcgcctcgtgaatga

SEQ ID NO: 432 - protein, 441 aa, Populus balsamifera subsp. trichocarpa
  misc_feature (1)..(441): Ceres GDNA ANNOT ID no. 1482129
  misc_feature (1)..(441)
  Functional Homolog of CDNA ID no. 3096137at SEQ ID no. 428with e-value of 1.9E-153 and percent identity of 76.75
MALPATMKVLGLVLGVSLIIFMAFLAEASIEMLLRFSRAGKCASYGGLMGDAFGKTGRIMLQVAVLINNVGVLIVYMIIIGDVLSGTSSSGSHHAGVLEGWFGEHWWNARTFVLLVTTLFVFSPLACFKRIVFLAPCTDSGDLECWPDGYFTSRTFFFLFLAKEQFFAGNFPYSLSYTSALSVALAVVFLIITVGITIVKLINGSIAMPRLMPDVTDMTSFWKLFTTVPVLVTAYICHYNVHSIDNELEDSTQIKPVVRTALALCSSVYMMTSIFGFLLFGDATLDDVLANFDTNLGIPYSSLLNDAVRVSYAAHLMLVFPIVFFPLRLNLDGLLFPSAQPFHQANTRFALVTIGLIALIFLGANCIPSIWDAFQFTGATAAVCLGFIFPASITLRDRHNIASKRDKILCIFMIALAVFSNGVAIYSDAYALIKKNPSPRE

SEQ ID NO: 433 - protein, 401 aa, Triticum aestivum
  misc_feature (1)..(401): Ceres CLONE ID no. 932657
  misc_feature (1)..(401)
  Functional Homolog of CDNA ID no. 3096137at SEQ ID no. 428with e-value of 2.8E-144 and percent identity of 68.18
MALPATMKVLGLVPGLVMIVLAAFLTDASVELLMRFSRVVGAPSYGAVMGDAFGWWGRRLLQVCVVVNNVGVMIVYVIIIGDVLSGTSSGGEHHYGVLEGWFGTHWWNGRFFVLLVTTLGVFTPLACFKRVDSLSYTSAISVALAVVFVVITAGIAIVKLIRGQIPMPKLFPAVPDLASVWELFTAVPVLVTAYVCHYNVHPIHNELKESSQIKPIVHTSLALCSTVYITTSFFGYLLFGESTLADVLANFDSNLGIPYSSVLSDAVRVSYAIHLMLVFPMIFHALRLNLDGLLFSSARPLSSDNRRFGVMTAVLLLVIFISANFIPSIWDAFQFTGATAAVCIAFIFPAAITLRDPHSIAKKWDKILAIFMIVLAVTSNVVAVYSDAYSIFHKKSASSNA

SEQ ID NO: 434 - protein, 448 aa, Oryza sativa subsp. japonica
  misc_feature (1)..(448): Public GI no. 50912345
  misc_feature (1)..(448)
  Functional Homolog of CDNA ID no. 3096137at SEQ ID no. 428with e-value of 2.2E-151 and percent identity of 67.76
MVMPMPTEGSEPLLPRKQRDGGDDGAASSHDHFDGASFSGAVFNLSTTIVGAGIMALPATMKVLGLVPGLILVMLAAVLTDASIELLVRFSRAVGATSYGEAMGDAFGAFGRGLLQLCVVVNNVGVMVVYMIIIGDVLSGKSSSGGVHHHGVIEGWFGPNRWNGRFSILVIVTLGVFTPLTCFKRVDSLKYTSALSVALAVVFVVITAGITTIKLMRGQIPMPKLFPDVHDWSSTWRLFTAAPVLVTAYICHYNVHPIHNELKDHSQIRPIVRASLLLCLAVYTTTSFFGFLLFGEATLDDVLANFDSDLGIPYSLVLDDAVRVSYVLHLMLVFPIVFHALRFNMDGLLFPSARPLSSDNRRFGAITAALLTVIFLAANFVPNIWDAFQFTGATAAVAIAYIFPAGMALRDRHGIATKGDKYLAVFMIVLALVANGVAVYSDACLGTF

SEQ ID NO: 435 - protein, 448 aa, Oryza sativa subsp. japonica
  misc_feature (1)..(448): Public GI no. 34898706
  misc_feature (1)..(448)
  Functional Homolog of CDNA ID no. 3096137at SEQ ID no. 428with e-value of 9.5E-151 and percent identity of 67.39
MGGGVTERLPEGSSEPLLPTKREGGGGGGEFAGAVFNLSTTIVGAGIMALPATMKVLGLAPGLVAILLAALLTDASIELLVRSSRAAGAPSYGAVMGDAFGWWGRRLLQVCVVVNNIGVMIVYMIIIGDVLSGTSSGGEHHYGVLEGWFGPQWWNGRFFVLLVTTLVVFTPLACLKRVDSLSYTSAISVALAVVFVIITAGIAIVKLIKGQIPMPKLFPDVPDLASIWELFTAVPVLVTAYVCHYNVHPIHNELKDPSQIKPIVHTSLVLCSTVYITTSFFGYLLFGESTLSDVLANFDSNLGIPYSQMLNDAVRVSYAVHLMLVFPMIFHALRLNLDGLLFSSSSPLSSDNRRFSVMTAVLLLVIFLSANFIPSIWDAFQFTGATAAVCIAFIFPAAITLRDPHSIAKKWDKILSIFMIVLAIVSNVVAVYSDAYSMFHRKSSPSIA

SEQ ID NO: 436 - protein, 411 aa, Zea mays
  misc_feature (1)..(411): Ceres CLONE ID no. 229480
  misc_feature (1)..(411)
  Functional Homolog of CDNA ID no. 3096137at SEQ ID no. 428with e-value of 1.6E-141 and percent identity of 67.00
MKVLGLVPGLVMIVLAALLTDASIELLVRFSRAAGARSYSAAMADAFGWWGRRLLQVCVVINNVGVMIVYMIIIGDVLSGSTSGGEHHYGVLEGWFGIHWWNGRLFVLLVTTLCVFTPLACLKRIDSLSYTSTISVALAVVFVIITAGIAVIKLIGGQIPMPKLFPTVSDLASVWELFTAVPVLVTAYVCHYNVHPIHNELKDSTQIKPIVHTSLTLCSTIYITTSFFGYLLFGESTLSDVLSNFDSNLGIPYSSVLNDAVRVSYAVHLMLVFPMIFHALRLNLDGLLFASARPLSSDNRRFGIITASLLLVIFGSAIFIPSIWDAFQFTGATAAVCIAFIFPAAITLRDSQGIAKKWDKILAIFMIVLAVVSNVVAVYSDAYKIFNKESAPSNAWIGESTENRSSWWLVR

SEQ ID NO: 437 - protein, 459 aa, Zea mays
  misc_feature (1)..(459): Ceres CLONE ID no. 259302
  misc_feature (1)..(459)
  Functional Homolog of CDNA ID no. 3096137at SEQ ID no. 428with e-value of 6.7E-150 and percent identity of 65.90
MGIGDGSSNGNQQPVHKEIRDETTPLLPVKVEEDEGFHEFNGASFSGAVFNLSTTIVGAGIMALPASIKMLGIIPGILLIILVALLTEASIDMLVRCSHQGKITSYGWLMGEVFGQWGRIALQASVIINNVGVLIVYMIIIGDVLSGTTSGDVHHRGILEGWFGAHLWNSRAIVLLATALLVFAPLVSFKRLDSLRYTSALSVALAVVFVVITAGIAIIKLFNGTVAMPKLFPELDGLNSIWNLFTAVPVLVTAYICHYNVHSIDNELEDRTQIKPIVRTSLFLCSSVYIATSFFAYLLFGEGTLDDVLANFDANLGIPFSSVFDDIVRVSYAAHVMLVFPIVFFALRLNLDGLLFPTSRHISRDNKRFAIITVSLLAVIYLAAILIPSIWDAFQFTGATAAVLIGFIFPAMVILRDSYGIASKRDKILAVTMIVLAVLSNSVALYSDAMNIFRKKEVA

SEQ ID NO: 438 - protein, 458 aa, Oryza sativa subsp. japonica
  misc_feature (1)..(458): Public GI no. 51535770
  misc_feature (1)..(458)
  Functional Homolog of CDNA ID no. 3096137at SEQ ID no. 428with e-value of 5.8E-151 and percent identity of 65.83
MGISSESPNGSQQIVQKETRDETTPLLPVKVEEEGFHEFNGASFSGAVFNLSTTIVGAGIMALPASIKMLGIIPGILMIIVVALLTEASIDMLVRCSHQGKITSYGWLMGEAYGQWGRIALQASVVINNIGVMIVYMIIIGDVLSGTSSTGVHHRGILEGWFGAHLWNSRAIVLLATTLFVFAPLVSFKRLDSLRYTSALSVALAVVFVVITAGIAIIKLFNGTVAMPKLFPELDGLSSIWKLFTAVPVLVTAYICHYNVHSIDNELEDRTQIKPIVRTSLFLCSSVYIATSFFAYLLFGEGTLDDVLANFDANLGIPFSSVFDDIVRVSYAAHVMLVFPIVFFALRLNLDGLLFPTSRHISRDNKRFAIITISLLTVIYLAAIFIPSIWDAFQFTGATAAVLIGFIFPAMVILRDPYGIASKRDKILAVTMIVLAVLSNSVALYSDAMNIFRKEEEA

SEQ ID NO: 439 - protein, 398 aa, Zea mays
  misc_feature (1)..(398): Ceres CLONE ID no. 257896
  misc_feature (1)..(398)
  Functional Homolog of CDNA ID no. 3096137at SEQ ID no. 428with e-value of 2.4E-136 and percent identity of 65.23
MALPASIKMLGIIPGILLIILVALLTEASIDMLVRCSHQGKITSYGWLMGEVFGQWGRIALQASVIINNVGVLIVYMIIIGDVLSGTTSGDVHHRGILEGWFGAHLWNSRAIVLLATALLVFAPLVSFKRLDSLRYTSALSVALAVVFVVITAGIAIIKLFNGTVAMPKLFPELDGLNSIWNLFTAVPVLVTAYICHYNVHSIDNELEDRTQIKPIVRTSLFLCSSVYIATSFFAYLLFGEGTLDDVLANFDANLGIPFSSVFDDIVRVSYAAHVMLVFPIVFFALRLNLDGLLFPTSRHISRDNKRFAIITVSLLAVIYLAAILIPSIWDAFQFTGATAAVLIGFIFPAMVILRDSYGIASKRDKILAVTMIVLAVLSNSVALYSDAMNIFRKKEVA

SEQ ID NO: 440 - DNA, 2157 bp, Populus balsamifera subsp. trichocarpa
  misc_feature (1)..(2157): Ceres GDNA ANNOT ID no. 1496626
atggagtttgggagctccgacgttagcttatggaaaaactccctctctgcatacccagcccgaattcaatctctcaacaaaccaaacctcgtttctcttgacgatttttacagaatcgaactcccttctctcattcaccaacgaaaccctgacccacacatcaccactcccgagctctccaagctcatgcaatggaaactctcccgtggcaaatggagaccgcgtttgctggattttgtgtcgtccttggacgaatcgcacgtgaaatcggcttctcaaaaggcatttgaatcgcttcctgatgtatccaaagctgtgtctgcgcttacggttttaaaaggtgttggtccggcaaccgcctctgccgttttggctgcttatgcgcctgatgtagcacctttcatgtctgatgaggccatggaggcagttcttggtaactctaaagattacacactgaagcagtatctattgtttgttgataaattgcagacaaaatccaagatccagactccaagaaggctaacacggccagagacatcaagagaaagagaaaacgttgatctagggacgtgccccttgcaccaatgcttagttgcaaggtcagaacttacaggacagcattttgtgctcaaatcacttcactgcagctacttactcctcttctcttttcttaaagacagtagttctgaccttactcccaaccacattttttttctctcacctgggacctcccccgcgatggagagggatgattccatcaagcctagaagttttgcagctaacttcaacagatttacattcgagaagtggagcgccactccgttactcgaaaaaggccaaccctctctattggacgaaaatccaactcttcccacttggcaatactatggccttgaccttgtaataaccattgcgtccacgtcgtttcccgcgttaacaaggaaaccccgtcccggaaacgcccctgcatcgcataaaaagaatccctcttcttcattccatctctccctcaggccgtcaagatacaatacaacgacggccaaaaattctgccttaatgacggttatgtcctcaaacgacataaaataccggaggagtccacgcatatcacacctcccacaaaaacacgacaattacgagcctctcgaggtcggcttcaatggagcatccttctccggcgccgtttttaacctctcaacaacgattgtcggtgccggaatcatggctttgccgtccacggtcaagcaattggggctaattccaggagatgtgctatccgggacgtggtcagatggggtgcggcattctggtgttatggaagaatggtttgatgaacattggtggactacacgttgctccttgttgctgttcaccacggtctttgtttttgctcctctcatctcattcaagcgtgttgattcattaagatacacatcagcgttgtcggtgggtttggccgttgtatttgttgccatcactgcaggagtggcagttgttaaactaattgaaggaaccattggaatgccacgtttgatgcctgaagtagttgatcagacatcattttggaaacttttcactacggtacctattatagtaacagcttatatctgccaccacaatgttcaccccatagagaatgaactaaaagaccatacccacatgaagtcaatagttcggacatccctgacattatgctcgtcggtctatattgctaccagtttctttggagttcttctttttggtgataaaacactggatgatgtccttgccaattttgatggcgatcttggtgttccatatagctcactgcttgatgatgtggtcagggtcagctatggtgtccacctgatgcttgtcttccctattgtgttcttctcccttcgcctcaacctggatgagcttctgttcccgtttgccacccccattgcatatgacaatcggagattcttcttaataactttagctctcatgggatttatctttctgggagccaattttgtgcctaacatctgggatgccttccagttcactggtgcgacagctgccatcgctgttggttttattttcccagctgccattgctctgaggccaaattcaagtataataaagttaaatttgttgactgagaataaaattaataggcagggatcaaagtag

SEQ ID NO: 441 - protein, 656 aa, Populus balsamifera subsp. trichocarpa
  misc_feature (1)..(656): Ceres GDNA ANNOT ID no. 1496626
  misc_feature (1)..(656)
  Functional Homolog of CDNA ID no. 3096137at SEQ ID no. 428with e-value of 1.1E-97 and percent identity of 64.51
MQWKLSRGKWRPRLLDFVSSLDESHVKSASQKAFESLPDVSKAVSALTVLKGVGPATASAVLAAYAPDVAPFMSDEAMEAVLGNSKDYTLKQYLLFVDKLQTKSKIQTPRRLTRPETSRERENVDLGTCPLHQCLVARSELTGQHFVLKSLHCSYLLLFSFLKDSSSDLTPNHIFFLSPGTSPAMERDDSIKPRSFAANFNRFTFEKWSATPLLEKGQPSLLDENPTLPTWQYYGLDLVITIASTSFPALTRKPRPGNAPASHKKNPSSSFHLSLRPSRYNTTTAKNSALMTVMSSNDIKYRRSPRISHLPQKHDNYEPLEVGFNGASFSGAVFNLSTTIVGAGIMALPSTVKQLGLIPGDVLSGTWSDGVRHSGVMEEWFDEHWWTTRCSLLLFTTVFVFAPLISFKRVDSLRYTSALSVGLAVVFVAITAGVAVVKLIEGTIGMPRLMPEVVDQTSFWKLFTTVPIIVTAYICHHNVHPIENELKDHTHMKSIVRTSLTLCSSVYIATSFFGVLLFGDKTLDDVLANFDGDLGVPYSSLLDDVVRVSYGVHLMLVFPIVFFSLRLNLDELLFPFATPIAYDNRRFFLITLALMGFIFLGANFVPNIWDAFQFTGATAAIAVGFIFPAAIALRPNSSIIKLNLLTENKINRQGSK

SEQ ID NO: 442 - protein, 398 aa, Triticum aestivum
  misc_feature (1)..(398): Ceres CLONE ID no. 557220
  misc_feature (1)..(398)
  Functional Homolog of CDNA ID no. 3096137at SEQ ID no. 428with e-value of 4.6E-135 and percent identity of 64.03
MALPASIKMLGIIPGILMIILVALLTEASIDMMVRCSHQAKITSYGWLMGDSFGQWGRIALQASVVINNVGVMIVYMIIIGDVLSGTSTTGVHHRGIFEGWFGPHFWNSRPVVLLATTIFVFAPLVSFKRLDSLRYTSALSVALAVVFVVITAGIAILRLIEGTAEIPKLFPEIHELNSIWELFTAVPVLVTAYICHYNVHSIDNELEDRSQTKPIVRTSLALCSSVYVATSFFAYLLFGEGTLSDVLANFDSDLHIPFSSVFNDIVRVSYVVHVMLVFPIVFFALRLNLDGLLFPTSRHISHDNRRFIIITVSLLAVIYLAANFIPSIWDAFQFTGATAAVLIGFIFPAMIILRDSYGIATKRDKVLAVTMIVLAVLSNSVALYSDAMSIFYRKVEA

SEQ ID NO: 443 - protein, 399 aa, Oryza sativa subsp. japonica
  misc_feature (1)..(399): Public GI no. 50726342
  misc_feature (1)..(399)
  Functional Homolog of CDNA ID no. 3096137at SEQ ID no. 428with e-value of 3.5E-50 and percent identity of 63.97
MNAGVAGFAGPLSMPRLIERARDWYKSLAVLTPVLSDVTADSAWDPRVPHACTAGRRRGEEPRASFSGAVFNLSTTIIGAGIMALPATMKVLSLVPGLILVMLAAVLTDASIELLVWFSRAVGATSYGEAMGDAFDPLKYTPAVSVALAVVFVVITVGIATIKLMKGQIPMPKLFPDVHDWSSTWRLPTAAPVLVSLHTIHNELKDHSLIRPIVRASLLLGLVVYTTTSFFGFLLFGEATLDDMLVFPIVFRALRFNMDGLLFPSARPFSCDNRRFGAITAELLTVIFLAANFVPNIWDAFQFTGSSCTGDDVDCGGGGDSCLTAVILVAAAVSPMRPRSSSASSTPVAGKKEKTATRWCSQSTAPRCEKAAAGHGMPPPAPPARHHQRPTLSGPSLAT

SEQ ID NO: 444 - protein, 459 aa, Oryza sativa subsp. japonica
  misc_feature (1)..(459): Public GI no. 50905855
  misc_feature (1)..(459)
  Functional Homolog of CDNA ID no. 3096137at SEQ ID no. 428with e-value of 1.9E-145 and percent identity of 62.70
MGIGNGSPSDSRHVSHKEIRDETTPLLPIKEEEEGIHEFNGASFSGAVFNLSTTIVGAGIMALPASIKMLGIIPGILMIILVALLTEASIDMLVRCSHEGKITSYGWLMGETFGQWGRIALQASVVINNIGMMIVYMIIVGDVLSGTSTSGVHHRGIFEGWFGPHLWNSRPVVLLATTLFVFGPLVSFKRLDSLRYTSALSVALAVVFVVITAGIAIVRLIEGTVEIPKLFPELDGTNSIWELFTAVPVVVTAYICHYNVHSIDNELEDRTQTKPIVQTSLALCSSVYIATSFFAYLLFGEGTLADVLANFDSNLHIPFSSVFNDVVRVSYVVHIMLVFPIVFFALRLNLDGLLFPTARHISRDNRRFAIITGSLLAVIYLAAIFIPSIWDAFQFTGATAAVLIGFIFPAMIILRDPYGIATKRDKILALTMIVLAVLSNSVALYSDALNIIFHRKVEA

SEQ ID NO: 445 - DNA, 2310 bp, Populus balsamifera subsp. trichocarpa
  misc_feature (1)..(2310): Ceres GDNA ANNOT ID no. 1443691
atggagtttgggagctccgacgttagcttatggaaaaactccctctctgcatacccagcccgaattcaatctctcaacaaaccaaacctcgtttctcttgacgatttttacagaatcgaactcccttctctcattcaccaacgaaaccctgacccacacatcaccactcccgagctctccaagctcatgcaatggaaactctcccgtggcaaatggagaccgcgtttgctggattttgtgtcgtccttggacgaatcgcacgtgaaatcggcttctcaaaaggcatttgaatcgcttcctgatgtatccaaagctgtgtctgcgcttacggttttaaaaggtgttggtccggcaaccgcctctgccgttttggctgcttatgcgcctgatgtagcacctttcatgtctgatgaggccatggaggcagttcttggtaactctaaagattacacactgaagcagtatctattgtttgttgataaattgcagacaaaatccaagtggttaaaaagttcagcaaaagctttggccacaccttacacattagagaaattagataaatttgtttatggcaggattgctcaaatccagactccaagaaggctaacacggccagagacatcaagagaaagagaaaacgttgatctagggacgtgccccttgcaccaatgcttagttgcaaggtcagaacttacaggacagcattttgtgctcaaatcacttcactgcagctacttactcctcttctcttttcttaaagacagtagttctgaccttactcccaaccacattttttttctctcacctgggacctcccccgcgatggagagggatgattccatcaagcctagaagttttgcagctaacttcaacagatttacattcgagaagtggagcgccactccgttactcgaaaaaggccaaccctctctattggacgaaaatccaactcttcccacttggcaatactatggccttgaccttgtaataaccattgcgtccacgtcgtttcccgcgttaacaaggaaaccccgtcccggaaacgcccctgcatcgcataaaaagaatccctcttcttcattccatctctccctcaggccgtcaagatacaatacaacgacggccaaaaattctgccttaatgacggttatgtcctcaaacgacataaaataccggaggagtccacgcatatcacacctcccacaaaaacacgacaattacgagcctctcgaggtcggcttcaatggagcatccttctccggcgccgtttttaacctctcaacaacgattgtcggtgccggaatcatggctttgccgtccacggtcaagcaattggggctaattccaggagatgtgctatccgggacgtggtcagatggggtgcggcattctggtgttatggaagaatggtttgatgaacattggtggactacacgttgctccttgttgctgttcaccacggtctttgtttttgctcctctcatctcattcaagcgtgttgattcattaagatacacatcagcgttgtcggtgggtttggccgttgtatttgttgccatcactgcaggagtggcagttgttaaactaattgaaggaaccattggaatgccacgtttgatgcctgaagtagttgatcagacatcattttggaaacttttcactacggtacctattatagtaacagcttatatctgccaccacaatgttcaccccatagagaatgaactaaaagaccatacccacatgaagtcaatagttcggacatccctgacattatgctcgtcggtctatattgctaccagtttctttggagttcttctttttggtgataaaacactggatgatgtccttgccaattttgatggcgatcttggtgttccatatagctcactgcttgatgatgtggtcagggtcagctatggtgtccacctgatgcttgtcttccctattgtgttcttctcccttcgcctcaacctggatgagcttctgttcccgtttgccacccccattgcatatgacaatcggagattcttcttaataactttagctctcatgggatttatctttctgggagccaattttgtgcctaacatctgggatgccttccagttcactggtgcgacagctgccatcgctgttggttttattttcccagctgccattgctctgagggacatgcatggaattgccacaaagaatgacagacgagcatcgtgggtgctgatattattggctgtctcatcaagtacagcagccatctgtagtgatatttacagcattttcacaagtgacagtggaattaaaagctga

SEQ ID NO: 446 - protein, 707 aa, Populus balsamifera subsp. trichocarpa
  misc_feature (1)..(707): Ceres GDNA ANNOT ID no. 1443691
  misc_feature (1)..(707)
  Functional Homolog of CDNA ID no. 3096137at SEQ ID no. 428with e-value of 3.2E-105 and percent identity of 61.64
MQWKLSRGKWRPRLLDFVSSLDESHVKSASQKAFESLPDVSKAVSALTVLKGVGPATASAVLAAYAPDVAPFMSDEAMEAVLGNSKDYTLKQYLLFVDKLQTKSKWLKSSAKALATPYTLEKLDKFVYGRIAQIQTPRRLTRPETSRERENVDLGTCPLHQCLVARSELTGQHFVLKSLHCSYLLLFSFLKDSSSDLTPNHIFFLSPGTSPAMERDDSIKPRSFAANFNRFTFEKWSATPLLEKGQPSLLDENPTLPTWQYYGLDLVITIASTSFPALTRKPRPGNAPASHKKNPSSSFHLSLRPSRYNTTTAKNSALMTVMSSNDIKYRRSPRISHLPQKHDNYEPLEVGFNGASFSGAVFNLSTTIVGAGIMALPSTVKQLGLIPGDVLSGTWSDGVRHSGVMEEWFDEHWWTTRCSLLLFTTVFVFAPLISFKRVDSLRYTSALSVGLAVVFVAITAGVAVVKLIEGTIGMPRLMPEVVDQTSFWKLFTTVPIIVTAYICHHNVHPIENELKDHTHMKSIVRTSLTLCSSVYIATSFFGVLLFGDKTLDDVLANFDGDLGVPYSSLLDDVVRVSYGVHLMLVFPIVFFSLRLNLDELLFPFATPIAYDNRRFFLITLALMGFIFLGANFVPNIWDAFQFTGATAAIAVGFIFPAAIALRDMHGIATKNDRRASWVLILLAVSSSTAAICSDIYSIFTSDSGIKS

SEQ ID NO: 447 - DNA, 1911 bp, Arabidopsis thaliana
  misc_feature (1)..(1911): Ceres CDNA ID no. 7082162
  misc_feature (1)..(1911): Also Known As  Ceres SEEDLINE ME07747
atccatgcagagacaacagaaaccacaacaaaaactttgagtcctcttcttctctatacacaaacatgaacacttttacctcaaactcttcggatctcactaccactgcaaccgaaacatcgtcctttagcaccttgtatctcctctcaacacttcaagcttttgtggctataaccttagtgatgctactcaagaaattgatgacggatcccaacaaaaagaaaccgtatctgccaccgggtcccacaggatggccgatcattggaatgattccgacgatgctaaagagccggcccgttttccggtggctccacagcatcatgaagcagctcaatactgagatagcatgcgtgaagttaggaaacactcatgtgatcaccgtcacgtgccctaagatagcacgtgagatactcaagcaacaagacgctctcttcgcgtcgaggcctttaacttacgctcagaagatcctctctaacggctacaaaacctgcgtgatcactccctttggtgaccaattcaagaaaatgaggaaagttgtgatgacggaactcgtatgtccagcgagacacaggtggctccaccagaagagatcagaagaaaacgatcatttaaccgcttgggtatacaacatggttaagaactcgggctctgtcgatttccggttcatgactaggcattactgtggaaatgcaatcaagaagcttatgttcgggacgagaacgttctctaagaacactgcacctgacggtggacccaccgtagaagatgtagagcacatggaagcaatgtttgaagcattagggtttaccttcgctttttgcatctctgattatctgccgatgctcactggacttgatcttaacggtcacgagaagattatgagagaatcaagtgcgattatggacaagtatcatgacccaatcatcgacgagaggatcaagatgtggagagaaggaaagagaactcaaatcgaagattttcttgatattttcatctctatcaaagacgaacaaggcaacccattgcttaccgccgatgaaatcaaacccaccattaaggagcttgtaatggcggcgccagacaatccatcaaacgccgtggaatgggccatggcggagatggtgaacaaaccggagattctccgtaaagcaatggaagagatcgacagagtcgtcgggaaagagagactcgttcaagaatccgacatcccaaaactaaactacgtcaaagctatcctccgcgaagctttccgtctccatcccgtcgccgccttcaacctcccccacgtggcactttctgacacaaccgtcgccggatatcacatccctaaaggaagtcaagtccttcttagccgatatgggctgggccgtaacccaaaagtttgggccgacccactttgctttaaaccggagagacatctcaacgaatgctccgaagttactttgaccgagaacgatctccggtttatctcgttcagtaccgggaaaagaggttgtgcggctccggcgctaggaacggcgttgaccacgatgatgctcgcgagacttcttcaaggtttcacttggaagctacctgagaatgagacacgtgtcgagctgatggagtctagtcacgatatgtttctggctaaaccgttggttatggtcggtgaccttagattgccggagcatctctacccgacggtgaagtgagatgagacgacgccgtatatattttatgaaactacttttatataatcgcccaaccaagtttggtcaattccggttaccagaagataattggtcaaattgtgaacaaacttgtgtgttggtttcttggttctttttgggacacttgaattgtgtctcctttacctcttcttttgttgttttcaataaaaacttttattaccatttcaataaaaagatcatc

SEQ ID NO: 448 - protein, 541 aa, Arabidopsis thaliana
  misc_feature (1)..(541): Ceres CDNA ID no. 7082162
  misc_feature (1)..(541): Also Known As  Ceres SEEDLINE ME07747
  misc_feature (57)..(506): Pfam Name: p450 Pfam Description: Cytochrome P450
  misc_feature: Phenotype: INFLORESCENCE Useful for making ornamental plants with modified flowers
  misc_feature: Phenotype: ROSETTE LEAVES Useful for making ornamental plants with modified leaves
  misc_feature: Phenotype: Short Useful for making shorter plants
  misc_feature: Phenotype: Reduced fertility Useful for sterility, genetic confinement systems
MNTFTSNSSDLTTTATETSSFSTLYLLSTLQAFVAITLVMLLKKLMTDPNKKKPYLPPGPTGWPIIGMIPTMLKSRPVFRWLHSIMKQLNTEIACVKLGNTHVITVTCPKIAREILKQQDALFASRPLTYAQKILSNGYKTCVITPFGDQFKKMRKVVMTELVCPARHRWLHQKRSEENDHLTAWVYNMVKNSGSVDFRFMTRHYCGNAIKKLMFGTRTFSKNTAPDGGPTVEDVEHMEAMFEALGFTFAFCISDYLPMLTGLDLNGHEKIMRESSAIMDKYHDPIIDERIKMWREGKRTQIEDFLDIFISIKDEQGNPLLTADEIKPTIKELVMAAPDNPSNAVEWAMAEMVNKPEILRKAMEEIDRVVGKERLVQESDIPKLNYVKAILREAFRLHPVAAFNLPHVALSDTTVAGYHIPKGSQVLLSRYGLGRNPKVWADPLCFKPERHLNECSEVTLTENDLRFISFSTGKRGCAAPALGTALTTMMLARLLQGFTWKLPENETRVELMESSHDMFLAKPLVMVGDLRLPEHLYPTVK

SEQ ID NO: 449 - protein, 540 aa, Brassica napus
  misc_feature (1)..(540): Public GI no. 25991347
  misc_feature (1)..(540)
  Functional Homolog of CDNA ID no. 7082162at SEQ ID no. 448with e-value of 6.5E-278 and percent identity of 93.70
MNTFTSNSSDLTSTTTQTSPFSNMYLLTTLQAFAAITLVMLLKKVFTTDKKKLSLPPGPTGWPIIGMVPTMLKSRPVFRWLHSIMKQLNTEIACVRLGNTHVITVTCPKIAREILKQQDALFASRPMTYAQNVLSNGYKTCVITPFGEQFKKMRKVVMTELVCPARHRWLHQKRAEENDHLTAWVYNLVKNSGSVDFRFVTRHYCGNAIKKLMFGTRTFSENTAPDGGPTAEDIEHMEAMFEALGFTFSFCISDYLPMLTGLDLNGHEKIMRDSSAIMDKYHDPIVDARIKMWREGKRTQIEDFLDIFISIKDEQGNPLLTADEIKPTIKELVMAAPDNPSNAVEWAMAEMVNKPEILHKAMEEIDRVVGKERLVQESDIPKLNYVKAILREAFRLHPVAAFNLPHVALSDATVAGYHIPKGSQVLLSRYGLGRNPKVWADPLSFKPERHLNECSEVTLTENDLRFISFSTGKRGCAAPALGTALTTMMLARLLQGFTWKLPENETRVELMESSHDMFLAKPLVMVGELRLPEHLYPTVK

SEQ ID NO: 450 - protein, 542 aa, Sinapis alba
  misc_feature (1)..(542): Public GI no. 3283433
  misc_feature (1)..(542)
  Functional Homolog of CDNA ID no. 7082162at SEQ ID no. 448with e-value of 8.6E-276 and percent identity of 92.79
MNTFTSNSSDLTSTTKQTLSFSNMYLLTTLQAFVAITLVMLLKKVLVNDTNKKKLSLPPGPTGWPIIGMVPTMLKSRPVFRWLHSIMKQLNTEIACVRLGSTHVITVTCPKIAREVLKQQDALFASRPMTYAQNVLSNGYKTCVITPFGEQFKKMRKVVMTELVCPARHRWLHQKRAEENDHLTAWVYNMVNNSDSVDFRFVTRHYCGNAIKKLMFGTRTFSQNTAPNGGPTAEDIEHMEAMFEALGFTFSFCISDYLPILTGLDLNGHEKIMRDSSAIMDKYHDPIIDARIKMWREGKKTQIEDFLDIFISIKDEEGNPLLTADEIKPTIKELVMAAPDNPSNAVEWAMAEMVNKPEILRKAMEEIDRVVGKERLVQESDIPKLNYVKAILREAFRLHPVAAFNLPHVALSDATVAGYHIPKGSQVLLSRYGLGRNPKVWADPLSFKPERHLNECSEVTLTENDLRFISFSTGKRGCAAPALGTALTTMLLARLLQGFTWKLPENETRVELMESSHDMFLAKPLVMVGELRLPEHLYPTVK

SEQ ID NO: 451 - protein, 566 aa, Arabidopsis thaliana
  misc_feature (1)..(566): Public GI no. 20198148
  misc_feature (1)..(566)
  Functional Homolog of CDNA ID no. 7082162at SEQ ID no. 448with e-value of 9.5E-254 and percent identity of 85.40
MQKQLAYITKHILIVSPSPSSLQMDTLASNSSDLTTKSSLGMSSFTNMYLLTTLQALAALCFLMILNKIKSSSRNKKLHPLPPGPTGFPIVGMIPAMLKNRPVFRWLHSLMKELNTEIACVRLGNTHVIPVTCPKIAREIFKQQDALFASRPLTYAQKILSNGYKTCVITPFGEQFKKMRKVIMTEIVCPARHRWLHDNRAEETDHLTAWLYNMVKNSEPVDLRFVTRHYCGNAIKRLMFGTRTFSEKTEADGGPTLEDIEHMDAMFEGLGFTFAFCISDYLPMLTGLDLNGHEKIMRESSAIMDKYHDPIIDERIKMWREGKRTQIEDFLDIFISIKDEAGQPLLTADEIKPTIKELVMAAPDNPSNAVEWAIAEMINKPEILHKAMEEIDRVVGKERFVQESDIPKLNYVKAIIREAFRLHPVAAFNLPHVALSDTTVAGYHIPKGSQVLLSRYGLGRNPKVWSDPLSFKPERHLNECSEVTLTENDLRFISFSTGKRGCAAPALGTAITTMMLARLLQGFKWKLAGSETRVELMESSHDMFLSKPLVLVGELRLSEDLYPMVK

SEQ ID NO: 452 - protein, 543 aa, Arabidopsis thaliana
  misc_feature (1)..(543): Public GI no. 42569237
  misc_feature (1)..(543)
  Functional Homolog of CDNA ID no. 7082162at SEQ ID no. 448with e-value of 9.5E-254 and percent identity of 85.40
MDTLASNSSDLTTKSSLGMSSFTNMYLLTTLQALAALCFLMILNKIKSSSRNKKLHPLPPGPTGFPIVGMIPAMLKNRPVFRWLHSLMKELNTEIACVRLGNTHVIPVTCPKIAREIFKQQDALFASRPLTYAQKILSNGYKTCVITPFGEQFKKMRKVIMTEIVCPARHRWLHDNRAEETDHLTAWLYNMVKNSEPVDLRFVTRHYCGNAIKRLMFGTRTFSEKTEADGGPTLEDIEHMDAMFEGLGFTFAFCISDYLPMLTGLDLNGHEKIMRESSAIMDKYHDPIIDERIKMWREGKRTQIEDFLDIFISIKDEAGQPLLTADEIKPTIKELVMAAPDNPSNAVEWAIAEMINKPEILHKAMEEIDRVVGKERFVQESDIPKLNYVKAIIREAFRLHPVAAFNLPHVALSDTTVAGYHIPKGSQVLLSRYGLGRNPKVWSDPLSFKPERHLNECSEVTLTENDLRFISFSTGKRGCAAPALGTAITTMMLARLLQGFKWKLAGSETRVELMESSHDMFLSKPLVLVGELRLSEDLYPMVK

SEQ ID NO: 453 - protein, 558 aa, Sorghum bicolor
  misc_feature (1)..(558): Public GI no. 5915822
  misc_feature (1)..(558)
  Functional Homolog of CDNA ID no. 7082162at SEQ ID no. 448with e-value of 3.1E-168 and percent identity of 59.67
MATMEVEAAAATVLAAPLLSSSAILKLLLFVVTLSYLARALRRPRKSTTKCSSTTCASPPAGVGNPPLPPGPVPWPVVGNLPEMLLNKPAFRWIHQMMREMGTDIACVKLGGVHVVSITCPEIAREVLRKQDANFISRPLTFASETFSGGYRNAVLSPYGDQWKKMRRVLTSEIICPSRHAWLHDKRTDEADNLTRYVYNLATKAATGDVAVDVRHVARHYCGNVIRRLMFNRRYFGEPQADGGPGPMEVLHMDAVFTSLGLLYAFCVSDYLPWLRGLDLDGHEKIVKEANVAVNRLHDTVIDDRWRQWKSGERQEMEDFLDVLITLKDAQGNPLLTIEEVKAQSQDITFAAVDNPSNAVEWALAEMVNNPEVMAKAMEELDRVVGRERLVQESDIPKLNYVKACIREAFRLHPVAPFNVPHVALADTTIAGYRVPKGSHVILSRTGLGRNPRVWDEPLRFYPDRHLATAASDVALTENDLRFISFSTGRRGCIAASLGTAMSVMLFGRLLQGFTWSKPAGVEAVDLSESKSDTFMATPLVLHAEPRLPAHLYPSISI

SEQ ID NO: 454 - DNA, 1587 bp, Populus balsamifera subsp. trichocarpa
  misc_feature (1)..(1587): Ceres GDNA ANNOT ID no. 1470714
atggaatatcttgctccaacttccttcacaaccctattaagcttcacagcttcacttcttgtcttagcaatcatactgttttacttcatccaatcccataagaatgtcaagaaacacccattgcctcccggtccaaaacgatggcctgttgttggatgcctccctaccatgctccgaaacaagccagtgtatcgatggatacacaatctcatgaaagaaatgaacactgaaatagcttgtatccgtttaggaaatgttcatgtgattcctgtcatttgtcctgatattgcttgtgaattcttaaaagcacaagataatacctttgcatctagacctcataccatgaccacagatctcatctcgagagggtacttaacaacagctctctctccctctggagaccaatggaataaaatgaagaaagttcttatgactcacgtactttctcctaaaaaacatcagtggctttatagcaaaagagttgaagaagctgatcaccttgttcattacgtgtataaccagtgcaagaagtctgtgcatcaaggtggcattgtgaatttgagaactgctgcccaacactattgtgcaaatctgactaggaagatgctgttcaataagaggttttttggggagggaatgaaagatggtggacctggttttgaggaagaggagtatgtggatgcacttttcagttgccttaatcatatatatgcattttgcatctcggattttttgccatctttgatagggcttgacttagatgggcatgagaaggtggtgatggagaatcataggatcatcaataaataccatgatcccataatccatgagagggttcaacaatggaaggatggtgcaaagaaggatacggaggacttgcttgatattttaattaccctaaaagatcgtcatggcaatcccctgttgtcaaaagatgagataaaagctcaaattacagaaataatggttgcagcagtggacaatccatcaaatgcttgtgaatgggcattcgcagagatgctaaaccaacctgagatacttgaaaaggctagtgaagaactggatagagtggttggaaaggagagacttgtccaagaatcagactttgcgcatctcaattacgtgaaggcatgtgctagagaagcattcaggcttcaccctgtggcaccatttaacgttcctcatgtgtcggccgccgatacaacagttgccaactacttcatcccgaaaggttcctatgttctgcttagccgtctaggactgggcagaaaccctaaagtatgggatgagccgctcaagttcaagcctgagcgccacctcaatgaaatggagaaggtggtgctgactgagaacaatctgcgattcatttcgttttccacaggaaaacgtgggtgcataggtgtgacacttgggacttcaatgactaccatgctatttgctagacttcttcaagcgtttacttggagtttaccacctagtcaatccagcatcgaccttaccattgcagaagacagcatggctcttgcaaaaccactgtgtgcacttgcaaaaccacgcttgcctccacaagtgtatcccggatactga

SEQ ID NO: 455 - protein, 472 aa, Populus balsamifera subsp. trichocarpa
  misc_feature (1)..(472): Ceres GDNA ANNOT ID no. 1470714
  misc_feature (1)..(472)
  Functional Homolog of CDNA ID no. 7082162at SEQ ID no. 448with e-value of 3.2E-151 and percent identity of 59.23
MLRNKPVYRWIHNLMKEMNTEIACIRLGNVHVIPVICPDIACEFLKAQDNTFASRPHTMTTDLISRGYLTTALSPSGDQWNKMKKVLMTHVLSPKKHQWLYSKRVEEADHLVHYVYNQCKKSVHQGGIVNLRTAAQHYCANLTRKMLFNKRFFGEGMKDGGPGFEEEEYVDALFSCLNHIYAFCISDFLPSLIGLDLDGHEKVVMENHRIINKYHDPIIHERVQQWKDGAKKDTEDLLDILITLKDRHGNPLLSKDEIKAQITEIMVAAVDNPSNACEWAFAEMLNQPEILEKASEELDRVVGKERLVQESDFAHLNYVKACAREAFRLHPVAPFNVPHVSAADTTVANYFIPKGSYVLLSRLGLGRNPKVWDEPLKFKPERHLNEMEKVVLTENNLRFISFSTGKRGCIGVTLGTSMTTMLFARLLQAFTWSLPPSQSSIDLTIAEDSMALAKPLCALAKPRLPPQVYPGY

SEQ ID NO: 456 - DNA, 1587 bp, Populus balsamifera subsp. trichocarpa
  misc_feature (1)..(1587): Ceres GDNA ANNOT ID no. 1470707
atggaatatctttctgcaacttccttcacagccctattaagcttcccaacttcacttcttgtcttagcaatcatactgttttacttcatccaatcccataggaatgtcaagaaacacccattgcctcccggtccaaaaccatggcctattgttggatgcctccctaccatgctccgaaacaagccagtgtatcgatggatacacaatctcatgaaagaaatgaacactgaaatagcttgtatccgtttaggaaatgttcttgtgattcctgtcatttgtcctgatattgcttgtgaattcttaaaagcacaagataatacctttgcatctagacctaataccatgaccacagatctcatctcgagaggttacttagcaacaattctctctccctctggagaccaatggaataaaatgaagaaagttcttatgactcatgtactttctccaaaaaaacatcagtggctttatagcaaaagagttgaagaagctgatcaccttgttcattacgtgtataaccagtgcaagaagtctgtgcatcaaggtggcattgtgaatttgagaactgctgcccggcactattgtgcaaatgtgactaggaagatgctgttcaataagaggttttttggggagggaatgaaagatgggggacctggttttgaggaagaggagtatatggatgcacttttcagttgccttaaacatatatatgcattttgcatctcggattttttgccatctttgatagggcttgacttagatgggcatgagaaggtggtgatggagaatcataggatcatcaataaataccatgatcccataatccatgagagggttcaacaatggaaggatggtgcaaagaaggatacggaggacttgcttgatattttaattaccctaaaagatcgtaatggcaatcccctgttgtcaaaagatgagataaaagctcaaattacagaaataatggttgcagcagtggacaatccatcaaatgcttgtgaatgggcattcgcagagatgctaaaccaacctgagatacttgaaaaggctactgaagaactggatagagtggttggaaaggagagacttgtccaagaatcagactttgcgcatctcaattacgtgaaggcatgtgctagagaagcattcaggcttcaccctttcgcaccatttaacgttcctcatgtgtcggccgccgatacaacagttgccaactacttcatcccgaaaggttcctatgttctgcttagccgtctaggactgggcagaaaccctaaagtatgggatgagccgctcaagttcaagccagagcgtcacctcaatgaaatggagaaggtggtgctgactgagaataatctgcgattcatttcgttttccactggaaaacgtgggtgcaaaggtgtgacacttgggacttcaatgactaccatgctatttgctagacttctccaagcgtttacttggagtttaccacctcgtcaatccagcatcgaccttaccattgcagaagacagcatggctcttgcaaaaccactgtgtgcacttgcaaaaccacgcttgcgtccacaagtgtatcccggatactga

SEQ ID NO: 457 - protein, 472 aa, Populus balsamifera subsp. trichocarpa
  misc_feature (1)..(472): Ceres GDNA ANNOT ID no. 1470707
  misc_feature (1)..(472)
  Functional Homolog of CDNA ID no. 7082162at SEQ ID no. 448with e-value of 5.3E-149 and percent identity of 58.80
MLRNKPVYRWIHNLMKEMNTEIACIRLGNVLVIPVICPDIACEFLKAQDNTFASRPNTMTTDLISRGYLATILSPSGDQWNKMKKVLMTHVLSPKKHQWLYSKRVEEADHLVHYVYNQCKKSVHQGGIVNLRTAARHYCANVTRKMLFNKRFFGEGMKDGGPGFEEEEYMDALFSCLKHIYAFCISDFLPSLIGLDLDGHEKVVMENHRIINKYHDPIIHERVQQWKDGAKKDTEDLLDILITLKDRNGNPLLSKDEIKAQITEIMVAAVDNPSNACEWAFAEMLNQPEILEKATEELDRVVGKERLVQESDFAHLNYVKACAREAFRLHPFAPFNVPHVSAADTTVANYFIPKGSYVLLSRLGLGRNPKVWDEPLKFKPERHLNEMEKVVLTENNLRFISFSTGKRGCKGVTLGTSMTTMLFARLLQAFTWSLPPRQSSIDLTIAEDSMALAKPLCALAKPRLRPQVYPGY

SEQ ID NO: 458 - DNA, 1584 bp, Populus balsamifera subsp. trichocarpa
  misc_feature (1)..(1584): Ceres GDNA ANNOT ID no. 1449045
atggactattttccatccactagctcattcataatcttattgagcttcccaattctttttcttgtcttagcgatcaccttattttcctttatccagtcctccaagaatgtcaagcaatactcactgcctcctggtccaagaccatggcctcttgttggatccctcccgacaatgctccgaaacaagccagtgtaccaatggatacacaatctcatgaaagaaatgaacactgaaatagcttgtatccgtctaggaaacatccatgtgattcctgtcacctgtcctaatattgcttgtgaattcttgaaagaacaagatgatgtattttcatctagacccgaaaccatatcctcttatctcgcatcaaatgggtacctagcgacagttgtatcaccatttggagatcagtggaagaaaatgaagtcagtcatggcaacacaagtgctttctcctacaaggcatcaatggcttcacaaaaaaagagttgaagaaggtgataaccttgttcgtcttgtttataaacaatgtcaggaatctgatcaagatggcatagtgaatttgcgattcacatcacagcattattgtgcaaatgttattaggaagctgatgttcaacaaaagatattttggagtgggaatggagaatggtggacctggttttgaagaggagcagcatgtggatgcactcttcactatcctcagtcatttattttcattttgtgtctcagattttttgtcattcttgacatggcttgacctagatggtcatgagaaggtgatgaaggagaaagataagatcatcaaaaagtatcatgatcccataattgacgacaggattcaacaatggaaggatggaaaaaagaaagacattgaggacttgcttgatgttttaataaccttaaaggatgacaatggcaatcctttattgtcaaaggatgagataaaagctcaagtggaagacataatcttagcagcagtggacaatccatcaaatgcttgtgaatgggcatttgcagagatgttaaacaaccctgagatactcgaaacagctgttgaagaattggatagagtggttgggaagcaacgactggtccaagaatcagattttgcacaactcaattacgtcaaggcctgcgctagagaagcctttcggctgcatcctgttgcaccatttaacgttcctcacgtatccatggctgatacagtagttgccaagcacttcatcccaaaaggtagttatgttattcttagcagattagggctcggtcgaaaccctaaagtttgggacgagccactagaattcaaaccagagcgtcatctcaaaggaacagggaatgttgtgttggctgagaatggattaagattcatttcattcagcacaggaaagcgtgggtgcatggctgtgacccttgggagttcgatgacgaacatgctatttgctaggcttcttcatggttttagttggagtttgccatcaaatgagtccagcattgacctttccaccgcaaaagatagcatggctctcgctaaaccactgcttgctgttgcgaaaccacgcttgcctgcacatttgtaccctaaataa

SEQ ID NO: 459 - protein, 470 aa, Populus balsamifera subsp. trichocarpa
  misc_feature (1)..(470): Ceres GDNA ANNOT ID no. 1449045
  misc_feature (1)..(470)
  Functional Homolog of CDNA ID no. 7082162at SEQ ID no. 448with e-value of 1.3E-152 and percent identity of 58.37
MLRNKPVYQWIHNLMKEMNTEIACIRLGNIHVIPVTCPNIACEFLKEQDDVFSSRPETISSYLASNGYLATVVSPFGDQWKKMKSVMATQVLSPTRHQWLHKKRVEEGDNLVRLVYKQCQESDQDGIVNLRFTSQHYCANVIRKLMFNKRYFGVGMENGGPGFEEEQHVDALFTILSHLFSFCVSDFLSFLTWLDLDGHEKVMKEKDKIIKKYHDPIIDDRIQQWKDGKKKDIEDLLDVLITLKDDNGNPLLSKDEIKAQVEDIILAAVDNPSNACEWAFAEMLNNPEILETAVEELDRVVGKQRLVQESDFAQLNYVKACAREAFRLHPVAPFNVPHVSMADTVVAKHFIPKGSYVILSRLGLGRNPKVWDEPLEFKPERHLKGTGNVVLAENGLRFISFSTGKRGCMAVTLGSSMTNMLFARLLHGFSWSLPSNESSIDLSTAKDSMALAKPLLAVAKPRLPAHLYPK

SEQ ID NO: 460 - protein, 516 aa, Glycine max
  misc_feature (1)..(516): Ceres CLONE ID no. 532331
  misc_feature (1)..(516)
  Functional Homolog of CDNA ID no. 7082162at SEQ ID no. 448with e-value of 4E-152 and percent identity of 56.67
MITCFIIMIKALRNNFIENYSNKQKPKLPPGPKPWPIVGNLPEMLANKPAHKWIHNLMKEMNTEIACIRLGNAYVIPVTCPTIAREFLRKQDATFASRSQSVSTDLISNGYSTTIFGPFGAQWKKMKKILTNDLLSPHKHLWLHGQRTEEADNLMFHVYNKCKNVNDGVGGLVNIRSVARHYCGNLTRKIIFNTRYFGKGREDGGPGFEEVEHVDSIFDLLKYVYAFSVSDYMPCLRGLDLDGHEKNVKEALKIIKKYHDPIVQERIKLWNDGLKVDEEDWLDVLVSLKDSNNNPLLTLEEINAQIIELMLATIDNPSNAFEWALAEMINQPELLHRAVEELDSVVGKERLVQESDIPKLNYVKACAREALRLHPIAPFIPPHVSMSDTMVGNYFIPKGSHVMLSRQELGRNPKVWNETYKFKPERHLKSDGSDVDLTEPNLKFISFSTGRRGCPGVMLGTTMTVMLFARLLHGFTWTAPPNVSSINLAESNDDILLAEPLVAVAKPRLASELYQL

SEQ ID NO: 461 - protein, 536 aa, Lotus japonicus
  misc_feature (1)..(536): Public GI no. 47156051
  misc_feature (1)..(536)
  Functional Homolog of CDNA ID no. 7082162at SEQ ID no. 448with e-value of 1.7E-142 and percent identity of 54.60
MGLTPDFLSFCLEFSWTFLLVVIFFFIIFKVTKSHSVNKSKKYKLPPGPKPWPIVGNLPEMLANRPATIWIHKLMKEMNTEIACIRLANTIVIPVTCPTIACEFLKKHDASFASRPKIMSTDIASDGFLTTVLVPYGEQWKKMKRVLVNNLLSPQKHQWLLGKRNEEADNLMFYIYNKCCKDVNDGPGLVNIRIAAQHYGGNVFRKLIFNTRYFGKVMEDGGPGFEEVEHINATFTILKYVYAFSISDFIPFLRRLDLDGHRSKIMKAMGIMKKYHDPIIHDRIKQWNDGLKTVEEDLLDVLIKLKDASNKPLLTLKEIKAQITELAIEMVDNPSNAFEWALAEMLNQPELLKRATEELDNVVGKERLVQESDIPKLQFVKACAREALRLHPMEYFNVPHLCMNDTMVGDYLFPKGTQVLLSRVALGRNPKFWTDPLKFNPERHLKEGIDVVLTEPDLRFISFTTGRRSCPGVTLGTTMTIMLFARMLHGFSWSAPPNVSSIDLTQSSDDLFMAKPLCVVAKPRLAAELYSTNEFK

SEQ ID NO: 462 - protein, 541 aa, Manihot esculenta
  misc_feature (1)..(541): Public GI no. 6739530
  misc_feature (1)..(541)
  Functional Homolog of CDNA ID no. 7082162at SEQ ID no. 448with e-value of 1.1E-156 and percent identity of 54.17
MAMNVSTTATTTASFASTSSMNNTAKILLITLFISIVSTVIKLQKRASYKKASKNFPLPPGPTPWPLIGNIPEMIRYRPTFRWIHQLMKDMNTDICLIRFGKTNVVPISCPVIAREILKKHDAVFSNRPKILCAKTMSGGYLTTIVVPYNDQWKKMRKVLTSEIISPARHKWLHDKRAEEADQLVFYINNQYKSNKNVNVRIAARHYGGNVIRKMMFSKRYFGKGMPDGGPGPEEIMHVDAIFTALKYLYGFCISDYLPFLEGLDLDGQEKIVLNANKTIRDLQNPLIEERIQQWRSGERKEMEDLLDVFITLQDSDGKPLLNPDEIKNQIAEIMIATIDNPANAVEWAMGELINQPELLAKATEELDRVVGKDRLVQESDIPNLNYVKACAREAFRLHPVAYFNVPHVAMEDAVIGDYFIPKGSWAILSRYGLGRNPKTWPDPLKYDPERHLNEGEVVLTEHDLRFVTFSTGRRGCVAALLGTTMITMMLARMLQCFTWTPPPNVTRIDLSENIDELTPATPITGFAKPRLAPHLYPTSP

SEQ ID NO: 463 - protein, 541 aa, Manihot esculenta
  misc_feature (1)..(541): Public GI no. 56553508
  misc_feature (1)..(541)
  Functional Homolog of CDNA ID no. 7082162at SEQ ID no. 448with e-value of 4.8E-156 and percent identity of 53.79
MAMNVSTTATTTASFASTSSMNNTAKILLITLFISIVSTVIKLQKRASYKKASKNFPLPPGPTPWPLIGNIPEMIRYRPTFRWIHQLMKDMNTDICLIRFGKTNVVPISCPVIAREILKKHDAVFSNRPKILCAKTMSGGYLTTIVVPYNDQWKKMRKVLTSEIISPARHKWLHDKRAEEADQLVFYINNQYKSNKNVNVRIAARHYGGNVIRKMMFSKRYFGKGMPDGGPGPEEIMHVDAIFTALKYLYGFCISDYLPFLEGLDLDGQEKIVLNANKTIRDLQNPLIEERIQQWRSGERKEMEDLLDVFITLQDSDGKPLLNPDEIKNQIAEIMIATIDNPANAVEWAMGELINQPELLAKATEELDRVVGKDRLVQESDIPNLNYVKACAREAFRLHPVAYFNVPHVAMEDAVIGDYFIPKGSWAILSRYGLGRNPKTWPDPLKYDPERHLNEGEVVLTEHDLRFVTFSTGRRGCVAALLGTTMITMMLARMLQCFTWTPPPNVTKIDLSENIDELTPSTPITGFAKPRLAPHLYPTSP

SEQ ID NO: 464 - protein, 535 aa, Lotus japonicus
  misc_feature (1)..(535): Public GI no. 47156049
  misc_feature (1)..(535)
  Functional Homolog of CDNA ID no. 7082162at SEQ ID no. 448with e-value of 2.8E-142 and percent identity of 53.66
MGLMPDFLSLCHEFPWTFLLVVIFSFMIFKVTKTHLVNKSKKYKLPPGPKPWPIVGNLPEMLANRPATIWIHKLMKEMNTEIACIRLANTIVIPVTCPTIACEFLKKHDASFASRPKIMSTDIASDGFITTVLVPYGEQWKKMKRVLVNNLLSPQKHQWLLGKRNEEADNLMFYIYNKCCKDVNDGPGLVNIRIAAQHYGGNVFRKLIFNSRYFGKVMEDGGPGFEEVEHINATFTILKYVYAFSISDFVPFLRRLDLDGHRSKIMKAMRIMRKYHDPIIDDRIKQWNDGLKTVEEDLLDVLIKLKDANNKPLLTLKELKAQIIELAIEMVDNPSNAFEWALAEMINQPELLKRATEELDNVVGKERLVQESDIPKLQFVKACAREALRLHPMEYFNVPHLCMNDTMVGDYLFPKGTQVLLSRVALGRNPKFWTDPLKFNPERHLKEGIDVVLTEPDLRFISFTTGRRSCPGVALGTTMTVMLFARMLHGFSWSPPPDVSSIDLVPSKDDLFLAKPLLLVAKPRLAAELYRTNEI

SEQ ID NO: 465 - protein, 542 aa, Manihot esculenta
  misc_feature (1)..(542): Public GI no. 6739527
  misc_feature (1)..(542)
  Functional Homolog of CDNA ID no. 7082162at SEQ ID no. 448with e-value of 1.2E-159 and percent identity of 53.07
MAMNVSTTIGLLNATSFASSSSINTVKILFVTLFISIVSTIVKLQKSAANKEGSKKLPLPPGPTPWPLIGNIPEMIRYRPTFRWIHQLMKDMNTDICLIRFGRTNFVPISCPVLAREILKKNDAIFSNRPKTLSAKSMSGGYLTTIVVPYNDQWKKMRKILTSEIISPARHKWLHDKRAEEADNLVFYIHNQFKANKNVNLRTATRHYGGNVIRKMVFSKRYFGKGMPDGGPGPEEIEHIDAVFTALKYLYGFCISDFLPFLLGLDLDGQEKFVLDANKTIRDYQNPLIDERIQQWKSGERKEMEDLLDVFITLKDSDGNPLLTPDEIKNQIAEIMIATVDNPSNAIEWAMGEMLNQPEILKKATEELDRVVGKDRLVQESDIPNLDYVKACAREAFRLHPVAHFNVPHVAMEDTVIGDYFIPKGSWAVLSRYGLGRNPKTWSDPLKYDPERHMNEGEVVLTEHELRFVTFSTGRRGCVASLLGSCMTTMLLARMLQCFTWTPPANVSKIDLAETLDELTPATPISAFAKPRLAPHLYPTSP

SEQ ID NO: 466 - DNA, 1716 bp, Arabidopsis thaliana
  misc_feature (1)..(1716): Ceres CDNA ID no. 1820566
  misc_feature (1)..(1716): Also Known As  Ceres SEEDLINE ME07751
atggagcgaggagctttagtgggttcttcttctacttctagctactatgttccttaccactttcgccaatcaaagtcgaatttttcgtcattcaaaccaaaaaataagctaaaccctactcaattccggtttaactgttcatggtttaagccggttagttctataacggcggcgaaatgcaatatgtttgactacgcggtgactgcagccggcgatgtggaggctgagcatccagttgacgacaaacagtttgtgcgttggttccgtgaagcatggccttatctttgggctcaccgtggctgcacattcgtcgttattatctccggcgagatcatcgccggctcttcttgtgatgccattttgaaggacatagcgtttcttcatcatctaggaataaggtttgttttagttcctggaactcaggagcaaatcgaccagcttctggctgagagaggacgcgaggctacgtatgtgggacgttacagagtaacggatgcagcatctttgcaggctgctaaagaagctgcaggagcaatatcagtgatgcttgaggccaaattatctcctggaccttctatttgcaatatccgtagacatggtgatcgtagtcgtttacatgatataggtgttagggttgataccggtaacttctttgcagcaaaaagaagaggtgttgttgatggtgttgattttggagcgactggtgaggtaaagaagatagatgtagatcggatttgtgagaggcttgacggtggttctgtagttttgttgaggaacttgggccactcgagctccggagaagtcttaaattgcaatacctatgaggttgctacagcttgtgctttagctataggagcagataagcttatttgcataatggacggcccaattcttgatgagagtggacatcttattcatttcttgacacttcaagaagcagatatgttagttcgaaaacgggcacaacaaagcgacatagctgcaaattacgtaaaagccgttggagatggaagcatggcttatcccgaacctcctaacaacaccaatggtaatattacttctgctcaaaacgggagagccgtttcattttggggaaacggaaaccacactccgatctttcagaacggtgttggatttgacaacggaaacggattgtggccttgtgagcaaggttttgctattggtggtgaagaaagattaagccgcttaaacggttatctttctgaattggctgctgcggcgttcgtctgcagaggtggagtcaaaagagttcacttgttggatggtactataagtggagttctattgttggagcttttcaaaagagatggaatgggaactatggttgctaggtacattcattcttttcgtcttcactcgcatatactcctggctttttcgtgttcttacaattctatattgcctgttacgtgcagtgatgtttacgaaggaacccgtgatgccagagtggaagatctagcaggaattagacatataatcaaacccttggaggaatcagggattttagttcgcagaactgatgaggagttactgcgagctttggattcatttgtggttgtggaaagggaaggacagatcatcgcttgtgcggctttgtttccgttcttcaaagacaaatgcggagaagttgctgcaatcgcggttgcatcagattgtcgcggtcaaggccaaggcgataaattgctcggtgaataa

SEQ ID NO: 467 - protein, 571 aa, Arabidopsis thaliana
  misc_feature (1)..(571): Ceres CDNA ID no. 1820566
  misc_feature (1)..(571): Also Known As  Ceres SEEDLINE ME07751
  misc_feature (101)..(338): Pfam Name: AA_kinase Pfam Description: Amino acid kinase family
  misc_feature (525)..(569): Pfam Name: Acetyltransf_1 Pfam Description: Acetyltransferase (GNAT) family
  misc_feature: Phenotype: INFLORESCENCE Useful for making ornamental plants with modified flowers
  misc_feature: Phenotype: Short Useful for making shorter plants
  misc_feature: Phenotype: Reduced fertility Useful for sterility, genetic confinement systems
MERGALVGSSSTSSYYVPYHFRQSKSNFSSFKPKNKLNPTQFRFNCSWFKPVSSITAAKCNMFDYAVTAAGDVEAEHPVDDKQFVRWFREAWPYLWAHRGCTFVVIISGEIIAGSSCDAILKDIAFLHHLGIRFVLVPGTQEQIDQLLAERGREATYVGRYRVTDAASLQAAKEAAGAISVMLEAKLSPGPSICNIRRHGDRSRLHDIGVRVDTGNFFAAKRRGVVDGVDFGATGEVKKIDVDRICERLDGGSVVLLRNLGHSSSGEVLNCNTYEVATACALAIGADKLICIMDGPILDESGHLIHFLTLQEADMLVRKRAQQSDIAANYVKAVGDGSMAYPEPPNNTNGNITSAQNGRAVSFWGNGNHTPIFQNGVGFDNGNGLWPCEQGFAIGGEERLSRLNGYLSELAAAAFVCRGGVKRVHLLDGTISGVLLLELFKRDGMGTMVARYIHSFRLHSHILLAFSCSYNSILPVTCSDVYEGTRDARVEDLAGIRHIIKPLEESGILVRRTDEELLRALDSFVVVEREGQIIACAALFPFFKDKCGEVAAIAVASDCRGQGQGDKLLGE

SEQ ID NO: 468 - DNA, 449 bp, Arabidopsis thaliana
  misc_feature (1)..(449): Ceres CDNA ID no. 13647376
  misc_feature (1)..(449): Also Known As  Ceres SEEDLINE ME09005
  misc_feature (1)..(449): Also Known As  Ceres CLONE ID no. 1356785
ggcatttttaagattcttttaattatatcagacagagagatatgacttttgtagttcgtcttcttgtgtgtctcttattgacgcttacaattacatcttctctagcccgcaaccctgtttccgtttcaggtgggtttgagaattctggattccaaaggagtttgttgatggtgaacgttgaggactacggtgacccatctgcaaatcctaagcacgaccccggcgttcctccgtcagcaaccggccaacgtgtcgtcggcagaggctgacgtaatgttttagttaacgcagaaggaaagaactcttcttgtttacattttcagtttgtctgagattaaatctcagttcatatagctttctctaatctgtctatatagatattttctcgtaatctccatacaacttcatttatttttttcttatggcaatgactttgtaccttattttcc

SEQ ID NO: 469 - protein, 75 aa, Arabidopsis thaliana [sequence omitted]

SEQ ID NO: 470 - protein, 73 aa, Brassica napus
  misc_feature (1)..(73): Ceres CLONE ID no. 951785
  misc_feature (1)..(73)
  Functional Homolog of CDNA ID no. 13647376at SEQ ID no. 469with e-value of 4E-14 and percent identity of 61.11
MSFVVLRLAVFLLLTLTVTYSSPSSVSVPVVKIGIERRSLIVNVKDYDGPSANPKHNPGTPPVTTSQRSPGRG

SEQ ID NO: 471 - DNA, 228 bp, Populus balsamifera subsp. trichocarpa
  misc_feature (1)..(228): Ceres GDNA ANNOT ID no. 1440346
atggcatttggagttcgcttgtgtttgtgtctcctgcttgtctttgctgtaacatcttcagctcgaaacaccatttcattctcagataacgaaatggccttggctataaaggggaggtccttgaagattacactgaacgattacggtgacccaatagcaaaccgtgggcacgatccttcacaaagaaacaagaattggggtggcagcggcggtggccgtaaaggctga

SEQ ID NO: 472 - protein, 75 aa, Populus balsamifera subsp. trichocarpa
  misc_feature (1)..(75): Ceres GDNA ANNOT ID no. 1440346
  misc_feature (1)..(75)
  Functional Homolog of CDNA ID no. 13647376at SEQ ID no. 469with e-value of 6.8E-07 and percent identity of 47.46
MAFGVRLCLCLLLVFAVTSSARNTISFSDNEMALAIKGRSLKITLNDYGDPIANRGHDPSQRNKNWGGSGGGRKG

SEQ ID NO: 473 - DNA, 923 bp, Arabidopsis thaliana
  misc_feature (1)..(923): Ceres CDNA ID no. 13647710
  misc_feature (1)..(923): Also Known As  Ceres SEEDLINE ME09099
  misc_feature (1)..(923): Also Known As  Ceres CLONE ID no. 1343068
agctcactagtcccccccccccccccgtccttcactctcatcattctttcttctttcaaaacatttccacaaacacaccaaactcacctgaaaccctatttccatttaccattcacactaatggcacgaccacaacaacgctttcgaggcgttagacagaggcattggggctcttgggtctccgaaattcgtcaccctctcttgaaaacaagaatctggctagggacgtttgagacagcggaggatgcagcaagggcctacgacgaggcggctaggctaatgtgtggcccgagagctcgtactaatttcccatacaaccctaatgccattcctacttcctcttccaagcttctatcagcaactcttaccgctaaactccacaaatgctacatggcttctcttcaaatgaccaagcaaacgcaaacacaaacgcaaacgcagaccgcaagatcacaatccgcggacagtgacggtgtgacggctaacgaaagtcatttgaacagaggagtaacggagacgacagagatcaagtgggaagatggaaatgcgaatatgcaacagaattttaggccattggaggaagatcatatcgagcaaatgattgaggagctgcttcactacggttccattgagctttgctctgttttaccaactcagacgctgtgagaaatggccttgtcgttttagcgtattcttttcatttttatttttgtttccacaaaaacggcgtcgtaagtgatgagagtagtagtgagagaaggctaatttcaagacattttgatctgaattggcctcttttgaaacactgattctagtttctataagagcaatcgatcatatgctatgttatgtatagtattataaaaaaatgttattttctgattaaaaaaaaaaaaaaaaaaactcgagggggggcccggttg

SEQ ID NO: 474 - protein, 181 aa, Arabidopsis thaliana
  misc_feature (1)..(181): Ceres CDNA ID no. 13647710
  misc_feature (1)..(181): Also Known As  Ceres SEEDLINE ME09099
  misc_feature (6)..(69): Pfam Name: AP2 Pfam Description: AP2 domain
  misc_feature: Phenotype: Late Flowering Useful for delaying flowering time
  misc_feature: Phenotype: ROSETTE LEAVES Useful for making ornamental plants with modified leaves
  misc_feature: Phenotype: Reduced fertility Useful for sterility, genetic confinement systems
MARPQQRFRGVRQRHWGSWVSEIRHPLLKTRIWLGTFETAEDAARAYDEAARLMCGPRARTNFPYNPNAIPTSSSKLLSATLTAKLHKCYMASLQMTKQTQTQTQTQTARSQSADSDGVTANESHLNRGVTETTEIKWEDGNANMQQNFRPLEEDHIEQMIEELLHYGSIELCSVLPTQTL

SEQ ID NO: 475 - protein, 200 aa, Glycine max
  misc_feature (1)..(200): Ceres CLONE ID no. 556472
  misc_feature (1)..(200)
  Functional Homolog of CDNA ID no. 13647710at SEQ ID no. 474with e-value of 1.6E-26 and percent identity of 41.34
MVQSRKFRGVRQRHWGSWVSEIRHPLLKRRVWLGTFETAEEAARAYDEAAILMSGRNAKTNFPVGENQIVGNHSSNTSSSSTTTLSAVLSAKLRKCCKSPSPSLTCLRLDTENSHIGVWQKRAGPRSDSNWIMMVELENKNNDNEGDHHQGPSSSDDSEFPVVVVDVDAQEKVKPEEESTGLDEEQKMALQMIEELLNRN

SEQ ID NO: 476 - protein, 204 aa, Lycopersicon esculentum
  misc_feature (1)..(204): Public GI no. 18650662
  misc_feature (1)..(204)
  Functional Homolog of CDNA ID no. 13647710at SEQ ID no. 474with e-value of 4.5E-54 and percent identity of 70.17
MARAQQRYRGVRQRHWGSWVSEIRHPLLKTRIWLGTFETAEDAARAYDEAARLMCGPRARTNFPYNPNMPQTSSSKLLSTTLTAKLHKCYMASLQMTKTSPQGQKLAKNATNVQESVINSYKMKQQMLVPKPSVLLTHHDHHEEAKVVNLGVGVIRKVEDQVLEGIPQFVKPLEDDHIEQMIEELLDYGSIELCSNVVPSHQIQ

SEQ ID NO: 477 - protein, 163 aa, Triticum aestivum
  misc_feature (1)..(163): Ceres CLONE ID no. 685191
  misc_feature (1)..(163)
  Functional Homolog of CDNA ID no. 13647710at SEQ ID no. 474with e-value of 3.5E-38 and percent identity of 62.42
MARPQQRYRGVRQRHWGSWVSEIRHPLLKTRIWLGTFETAEDAARAYDEAARIMCGPRVRTNFPDDAAPSSSFLSPALVAKLHRFNVACGSQAGQQQDKDASTSSVGVDPRSPPAPFAGYTGNASAAAASAAAGWSGGFLEEQYVEQMIEELLDSNFSMEISY

SEQ ID NO: 478 - protein, 164 aa, Lupinus polyphyllus
  misc_feature (1)..(164): Public GI no. 19507
  misc_feature (1)..(164)
  Functional Homolog of CDNA ID no. 13647710at SEQ ID no. 474with e-value of 3.1E-46 and percent identity of 63.52
MARPQQRYRGFRQRHWGSWVSEIRHSILKTRIWQGTFESAEDAARAYDEAARLMCGTRARTNFPYNPNASQSSSSKLLSATLIAKLHRCYMASLQMTRPSSLPEAPRIIASPNNAVKGIGADAMLLPKKREQEEQETGGNLDFKKVKVECSQQFKPLEEDHIAQ

SEQ ID NO: 479 - protein, 152 aa, Zea mays
  misc_feature (1)..(152): Ceres CLONE ID no. 314589
  misc_feature (1)..(152)
  Functional Homolog of CDNA ID no. 13647710at SEQ ID no. 474with e-value of 5E-39 and percent identity of 63.58
  misc_feature (147)..(147): Xaa is any aa, unknown, or other
MARPQQRYRGVRQRHWGSWVSEIRHPLLKARIWLGTFETAEDAARAYDEAARIMCGPRARTNFPADANGPPPSFLSAALVDKLHRFNLASVQAAQRQREAAAAAAAAAAAATSAPATPPAAQWGGGRSLEEQHVEQMIEELLDSDFXMEICC

SEQ ID NO: 480 - DNA, 953 bp, Arabidopsis thaliana
  misc_feature (1)..(953): Ceres CDNA ID no. 13612096
  misc_feature (1)..(953): Also Known As  Ceres SEEDLINE ME09444
gctagagactctctagtagagagaaagagagagaaacacaaacacgcacacataacgagtgattttagagagagatagagatctggaaggtgacgtcgtaggagattatggcggcggttaggagaagagaacgagatgtggttgaagagaatggagttacgacgacgacggtgaaacgaaggaagatggaggaggaagtggatttagtggaatctaggataattctgtctccgtgtgtacaggcgacgaatcgcggtggaattgtggcgagaaattcagcaggagcgtcggagacgagtgttgttatagtacgacggcgagattctcctccggttgaagaacagtgtcaaatcgaagaagaagattcgtcggtttcgtgttgttctacatcggaagagaaatcgaaacggagaatcgaatttgtagatcttgaggaaaataacggtgacgatcgtgaaacagaaacgtcgtggatttacgatgatttgaataagagtgaggaatcgatgaacatggattcttcttcggtggctgttgaagatgtagagtctcgccgcaggttaaggaagagtctccatgagacggtgaaggaagctgagttagaagacttttttcaggtggcggagaaagatcttcggaataagttgttggaatgttctatgaagtataacttcgatttcgagaaagatgagccacttggtggaggaagatacgagtgggttaaattgaatccatgaagaagacgatgatgataatgatgatcattgttttcaccaaagtacttattatttctcttctgtaataatctttgctttgatttttcttttaacaaaatccaaatgtagatatctttctctcgaataatcaataacatgtaattcaacttttgtttgtacttccttgaggtaattaattagattcgtgtttttctcgattaataaactataagttta

SEQ ID NO: 481 - protein, 209 aa, Arabidopsis thaliana
  misc_feature (1)..(209): Ceres CDNA ID no. 13612096
  misc_feature (1)..(209): Also Known As  Ceres SEEDLINE ME09444
  misc_feature (155)..(208): Pfam Name: CDI Pfam Description: Cyclin-dependent kinase inhibitor
  misc_feature: Phenotype: Serrate Margins Useful for making plants with increased biomass and foliage
  misc_feature: Phenotype: Short Useful for making shorter plants
  misc_feature: Phenotype: Reduced fertility Useful for sterility, genetic confinement systems
MAAVRRRERDVVEENGVTTTTVKRRKMEEEVDLVESRIILSPCVQATNRGGIVARNSAGASETSVVIVRRRDSPPVEEQCQIEEEDSSVSCCSTSEEKSKRRIEFVDLEENNGDDRETETSWIYDDLNKSEESMNMDSSSVAVEDVESRRRLRKSLHETVKEAELEDFFQVAEKDLRNKLLECSMKYNFDFEKDEPLGGGRYEWVKLNP

SEQ ID NO: 482 - DNA, 588 bp, Arabidopsis thaliana
  misc_feature (1)..(588): Ceres CDNA ID no. 12652028
  misc_feature (1)..(588): Also Known As  Ceres SEEDLINE ME09450
atgagcgaaacaaaacccaagagagattctgagtacgaaggatcaaacatcaagaggatgagactcgatgatgatgatgacgttttacgctcaccgacgagaactctttcttcttcttcctcttcttctctggcttactcggtttcagattccggaggtttctgctccgtcgcgttatctgaagaagaagacgatcatctaagctcaagcatcagctctggttgttccagcagcgaaactaacgaaatcgctactcgtcttccattttcagatctggaggctcatgaaatctccgaaaccgaaatctcaacgttactcaccaacaatttcaggaaacagggaatttcatcaagcgagaatctgggagaaacagcagaaatggactcggcgacgacggagatgagagatcagagaaagacggagaagaagaagaagatggaaaaatcaccgacgcaggcagagcttgatgactttttctcggcggcggagagatacgaacagaaacgattcacagaaaagtacaactacgacatcgtcaatgatacgccgcttgaaggtcggtaccagtgggttagtctgaaaccttag

SEQ ID NO: 483 - protein, 195 aa, Arabidopsis thaliana
  misc_feature (1)..(195): Ceres CDNA ID no. 12652028
  misc_feature (1)..(195): Also Known As  Ceres SEEDLINE ME09450
  misc_feature (145)..(194): Pfam Name: CDI Pfam Description: Cyclin-dependent kinase inhibitor
  misc_feature: Phenotype: Early Senescence Useful for accelerating crop development and harvest
  misc_feature: Phenotype: Serrate Margins Useful for making plants with increased biomass and foliage
  misc_feature: Phenotype: Short Useful for making shorter plants
  misc_feature: Phenotype: Reduced fertility Useful for sterility, genetic confinement systems
MSETKPKRDSEYEGSNIKRMRLDDDDDVLRSPTRTLSSSSSSSLAYSVSDSGGFCSVALSEEEDDHLSSSISSGCSSSETNEIATRLPFSDLEAHEISETEISTLLTNNFRKQGISSSENLGETAEMDSATTEMRDQRKTEKKKKMEKSPTQAELDDFFSAAERYEQKRFTEKYNYDIVNDTPLEGRYQWVSLKP

SEQ ID NO: 484 - DNA, 828 bp, Arabidopsis thaliana
  misc_feature (1)..(828): Ceres CDNA ID no. 12734396
  misc_feature (1)..(828): Also Known As  Ceres SEEDLINE ME09468
atggagaattcttacgactcaagcaagtggtctgattctacaactccatatatggtctcgtggtcactacaatctgagtcctctgattctgattggaaccggtttaatcttggcttctcttcttcctccttcggtggtaatttcccggctgatgattgtgtcggtgggatcgaaaaagctgagtcactttcaagaagccaccgtctagcggagaaaagacgccgtgaccggataaattctcacctcactgctctccggaaacttgtccccaattccgacaagttagacaaagcagctctattagcaacagtgattgaacaagtgaaagaactcaaacaaaaagcagcagaatcaccaatcttccaagatcttccaacagaagcagatgaagtaactgtacagcctgaaactatctctgactttgaatcaaacacaaacacaatcatcttcaaagcttctttttgctgcgaagatcaacccgaagcaatctcagagattattagagttctcacaaagcttcaactcgaaacaatccaagcagagataatctctgttgggggaagaatgagaatcaatttcatcttaaaagatagcaactgcaatgagactacaaacatagctgcttcagcaaaagctttgaagcaatctctctgctctgcgttaaatcgaatcacatcttcttctacgactacttcttcagtttgcagaatcagaagtaaaagacagagatggttcctctcttctcattattctcacaatgaataaatttcacaatatacatatacatagtataacacaaacctcattattactaaaggttttttccgc

SEQ ID NO: 485 - protein, 254 aa, Arabidopsis thaliana
  misc_feature (1)..(254): Ceres CDNA ID no. 12734396
  misc_feature (1)..(254): Also Known As  Ceres SEEDLINE ME09468
  misc_feature (63)..(112): Pfam Name: HLH Pfam Description: Helix-loop-helix DNA-binding domain
  misc_feature: Phenotype: Misc. Dwarf Useful for decreasing plant size
  misc_feature: Phenotype: Oval Shaped Useful for making plants with increased biomass and foliage
  misc_feature: Phenotype: Sickle Useful for modifying fruit shape, composition and seed yield
  misc_feature: Phenotype: Reduced fertility Useful for sterility, genetic confinement systems
MENSYDSSKWSDSTTPYMVSWSLQSESSDSDWNRFNLGFSSSSFGGNFPADDCVGGIEKAESLSRSHRLAEKRRRDRINSHLTALRKLVPNSDKLDKAALLATVIEQVKELKQKAAESPIFQDLPTEADEVTVQPETISDFESNTNTIIFKASFCCEDQPEAISEIIRVLTKLQLETIQAEIISVGGRMRINFILKDSNCNETTNIAASAKALKQSLCSALNRITSSSTTTSSVCRIRSKRQRWFLSSHYSHNE

SEQ ID NO: 486 - DNA, 650 bp, Arabidopsis thaliana
  misc_feature (1)..(650): Ceres CDNA ID no. 13621103
  misc_feature (1)..(650): Also Known As  Ceres SEEDLINE ME09503
agagatatgggaagagggagaagttcatcgtcttcttcaatagagagtagcagcaagagcaacccattcggtgcttcgtcaagtactcgaaacctaagcacggacctgagactcggactcagcttcgggacatcctcagggactcaatatttcaacggtggctatgggtactccgttgcagctccggcggtagaggatgcggaatatgtggcggctgtggaggaggaagaagagaatgagtgtaacagtgtagggagcttttacgtgaaagtgaacatggaaggagttccaattggaagaaagatcgatctaatgtctcttaatggctaccgcgacttgatcagaacccttgatttcatgttcaacgcatccattctctgggctgaagaagaagacatgtgcaatgagaagagtcacgtgctaacgtacgcagataaggaaggtgactggatgatggttggagatgttccttgggagatgttcttgtctactgtgagaagactgaagatttcaagagctaattaccactactgatatataagtctacgtacttgttgtgtttaaatcgaagtaatgccaagaaaaaagtttttgcctgatgtaaatcaatggtcggatatttataatattattttcatttttcttttgtg

SEQ ID NO: 487 - protein, 175 aa, Arabidopsis thaliana
  misc_feature (1)..(175): Ceres CDNA ID no. 13621103
  misc_feature (1)..(175): Also Known As  Ceres SEEDLINE ME09503
  misc_feature (32)..(171): Pfam Name: AUX_IAA Pfam Description: AUX/IAA family
  misc_feature: Phenotype: Curled 2 Useful for making plants with altered leaf shape e.g., curled leaves
  misc_feature: Phenotype: Short Useful for making shorter plants
  misc_feature: Phenotype: Reduced fertility Useful for sterility, genetic confinement systems
MGRGRSSSSSSIESSSKSNPFGASSSTRNLSTDLRLGLSFGTSSGTQYFNGGYGYSVAAPAVEDAEYVAAVEEEEENECNSVGSFYVKVNMEGVPIGRKIDLMSLNGYRDLIRTLDFMFNASILWAEEEDMCNEKSHVLTYADKEGDWMMVGDVPWEMFLSTVRRLKISRANYHY

SEQ ID NO: 488 - protein, 176 aa, Populus tremula x Populus tremuloides
  misc_feature (1)..(176): Public GI no. 20269055
  misc_feature (1)..(176)
  Functional Homolog of CDNA ID no. 13621103at SEQ ID no. 487with e-value of 7.4E-38 and percent identity of 54.65
MGRGATSSSSSSFESSNYPSVSTKSSLSQLKKDLSTDLRLGLSISASQQENPSTPSDQQLSDWPPIKPLNLSKALESEENECSSATFFVKVYMEGIPIGRKLNLLAHDGYHDLIQTLDQMFNTSILWPEMDIEHSGQCHVLTYEDKEGDWLIVGDVPWEMFLPSVRRLKITRADSL

SEQ ID NO: 489 - DNA, 528 bp, Populus balsamifera subsp. trichocarpa
  misc_feature (1)..(528): Ceres GDNA ANNOT ID no. 1524883
atgggcagaggagctacctctagttcttcatcttcttttgaaagcagcaactacccatctgtatcaagcaagtcttctctctctcagctaaagaaagacctaagcacagatctcaggcttggacttagcatctcaacctctcaacaggagaacccttctacaccaagtgatcagcaactttcggactggccaccaatcaagccatttctaaggaaggcattagcgtcagaagaaaatgagtgcagtagtgccaccttcttcgtcaaggtttacatggaaggcattccgattggaaggaagctcaacctcttagcccatgatggttaccatgacttaatacagactcttgaccaaatgttcaacactagcattctctggcctgaaatggatattgaacattctgggcaatgtcatgtgttgacatatgaagacaaagagggggattggttgattgttggggatgttccctgggagatgttcttaccttctgtgcggagattgaagatcactagggcagacagcctatga

SEQ ID NO: 490 - protein, 175 aa, Populus balsamifera subsp. trichocarpa
  misc_feature (1)..(175): Ceres GDNA ANNOT ID no. 1524883
  misc_feature (1)..(175)
  Functional Homolog of CDNA ID no. 13621103at SEQ ID no. 487with e-value of 2.6E-37 and percent identity of 55.03
MGRGATSSSSSSFESSNYPSVSSKSSLSQLKKDLSTDLRLGLSISTSQQENPSTPSDQQLSDWPPIKPFLRKALASEENECSSATFFVKVYMEGIPIGRKLNLLAHDGYHDLIQTLDQMFNTSILWPEMDIEHSGQCHVLTYEDKEGDWLIVGDVPWEMFLPSVRRLKITRADSL

SEQ ID NO: 491 - DNA, 525 bp, Populus balsamifera subsp. trichocarpa
  misc_feature (1)..(525): Ceres GDNA ANNOT ID no. 1497918
atgggcagaggagctgcctctagctcttcatcatctttcgaaagcagccgctacccatctgtctccggcgagtcttctttccctcatgtaaagagggaccttagcacagatctaaggcttggacttggcatatcaacctctcgacaggacaacccttccacaccaagtgagcagctattggattggccaccgatcaagccgtctccggggaaggcagtaacatcagaagaaaatgagtgctgtagttccaccttattcgtcaaggtgtacatggaaggcattcaaattggaaggaaactgaacctattagcccacgatggttaccatgacttgatacagactctcgacgaaatgttcaacactagcattctctggcctgaaatggatgttgaacattccgggaaatgccatgtgctgacatatgaagacaaagagggcgattggttgattgttggggatgttccatgggaggtgttcttaccttctgtgcggagattgaagatcaccagggcagacagcctatga

SEQ ID NO: 492 - protein, 174 aa, Populus balsamifera subsp. trichocarpa
  misc_feature (1)..(174): Ceres GDNA ANNOT ID no. 1497918
  misc_feature (1)..(174)
  Functional Homolog of CDNA ID no. 13621103at SEQ ID no. 487with e-value of 7.2E-35 and percent identity of 54.76
MGRGAASSSSSSFESSRYPSVSGESSFPHVKRDLSTDLRLGLGISTSRQDNPSTPSEQLLDWPPIKPSPGKAVTSEENECCSSTLFVKVYMEGIQIGRKLNLLAHDGYHDLIQTLDEMFNTSILWPEMDVEHSGKCHVLTYEDKEGDWLIVGDVPWEVFLPSVRRLKITRADSL

SEQ ID NO: 493 - DNA, 474 bp, Populus balsamifera subsp. trichocarpa
  misc_feature (1)..(474): Ceres GDNA ANNOT ID no. 1471472
atgggcagaggagctacctctagttcttcatcttcttttgaaagcagcaactacccatctgtatcaagcaagtcttctctctctcagctaaagaaagacctaagcacagatctcaggcttggacttagcatctcaacctctcaacaggagaacccttctacaccaagtgatcagcaactttcggactggccaccaatcaagccatttctaaggaaggcattagcgtcagaagaaaatgagtgcagtagtgccaccttcttcgtcaaggtttacatggaaggcattccgattggaaggaagctcaacctcttagcccatgatgggcctgaaatggatattgaacattctgggcaatgtcatgtgttgacatatgaagacaaagagggggattggttgattgttggggatgttccctgggagatgttcttaccttctgtgcggagattgaagatcactagggcagacagcctatga

SEQ ID NO: 494 - protein, 157 aa, Populus balsamifera subsp. trichocarpa
  misc_feature (1)..(157): Ceres GDNA ANNOT ID no. 1471472
  misc_feature (1)..(157)
  Functional Homolog of CDNA ID no. 13621103at SEQ ID no. 487with e-value of 7.3E-26 and percent identity of 53.64
MGRGATSSSSSSFESSNYPSVSSKSSLSQLKKDLSTDLRLGLSISTSQQENPSTPSDQQLSDWPPIKPFLRKALASEENECSSATFFVKVYMEGIPIGRKLNLLAHDGPEMDIEHSGQCHVLTYEDKEGDWLIVGDVPWEMFLPSVRRLKITRADSL

SEQ ID NO: 495 - protein, 174 aa, Populus tremula x Populus tremuloides
  misc_feature (1)..(174): Public GI no. 20269053
  misc_feature (1)..(174)
  Functional Homolog of CDNA ID no. 13621103at SEQ ID no. 487with e-value of 1E-33 and percent identity of 52.35
MVRGAASSSSSSFESSSYPSVSGESSFPQGKRDLSTDLRLGLGISTSRQDNPSTPSEQLLDWPPIKPSPGKAVTSEENEYSSSTLFVKVYMEGIQIGRKLNLLAHDGYHDLIQTLDQMFNTSILWPEMDVEHSGKCHVLTYEDQEGDWLIVGDVPWEVFLPSVRRLKITRADSL

SEQ ID NO: 496 - protein, 180 aa, Glycine max
  misc_feature (1)..(180): Ceres CLONE ID no. 675127
  misc_feature (1)..(180)
  Functional Homolog of CDNA ID no. 13621103at SEQ ID no. 487with e-value of 4.8E-34 and percent identity of 46.86
MGKPASSSSSSISSTTNRRLLISTASSLTQQLPTDLRLGLGISATQHVASSISRGQWQQPHHPFVNNNYSQAAASAEVNDCSNDHSSFFVKVYMEGIPIGRKLNILAHGGYYELVRTLEHMFDTTILWGTEMNGVQPERCHVLTYEDEEGDLVMVGDVPWEMFLSTVKRLKITRVDTFGC

SEQ ID NO: 497 - protein, 205 aa, Oryza sativa subsp. japonica
  misc_feature (1)..(205): Public GI no. 50912269
  misc_feature (1)..(205)
  Functional Homolog of CDNA ID no. 13621103at SEQ ID no. 487with e-value of 5.6E-24 and percent identity of 46.47
MECMASTEESLPASSSMDSCSGELPTTTTTAPAQSTASSGCRPPATAAKRRSLISTDLRLGLTLSSVVHIDGNNPSTPRSSLTTATVTADRGGGGGGHGRRRSLFVKVYMEGVPIGRKLDLLPLDGYKGLVARLASMFRASITYHHCHRQFAVVGMKTNKVHHVLTYEDQEGDWMMAGDVPWELFLTSVKRLRIARADDKYCYSC

SEQ ID NO: 498 - protein, 233 aa, Triticum aestivum
  misc_feature (1)..(233): Ceres CLONE ID no. 742023
  misc_feature (1)..(233)
  Functional Homolog of CDNA ID no. 13621103at SEQ ID no. 487with e-value of 4.3E-19 and percent identity of 36.00
MAGADVDVGTELRLGLPGGGAEAAKAGKRGYEDTIDLKLTLPTGGMQEDSAGKPEPAADKAKRPAEAAAADPEKPPAPKAQAVGWPPVRSYRRNAMTVQSVKIKKEEETEKQQPAAAAAAGANGSNFVKVSMDGAPYLRKVDLKMYNTYKDLSIALQKMFSTFTATGNEGKMVEAVNGSDVVTTYEDKDGDWMLVGDVPWEMFVASCKRLRIMKGSEAIGLAPRAKDKYKNKS

SEQ ID NO: 499 - protein, 233 aa, Triticum aestivum; identical to SEQ ID NO: 498
  misc_feature (1)..(233): Public GI no. 32400272
  misc_feature (1)..(233)
  Functional Homolog of CDNA ID no. 13621103at SEQ ID no. 487with e-value of 4.3E-19 and percent identity of 36.00

SEQ ID NO: 500 - protein, 153 aa, Brassica napus
  misc_feature (1)..(153): Ceres CLONE ID no. 962494
  misc_feature (1)..(153)
  Functional Homolog of CDNA ID no. 13621103at SEQ ID no. 487with e-value of 1.7E-15 and percent identity of 32.45
MEEEKRLELRLAPPCHQLTHNSNINGSKQRSLTKETSFVSNNRVEAAPVVGWPPVRSSRRYLTSQLKEEMKKIESDEERELYVKINMEGVPIGRKVNLSAYNNYQQLSHAVDQLFKKDSSDLNRQYTLVYEDTEGDKVLVGDVPWEMFVSTVK

SEQ ID NO: 501 - protein, 231 aa, Pinus taeda
  misc_feature (1)..(231): Public GI no. 32396299
  misc_feature (1)..(231)
  Functional Homolog of CDNA ID no. 13621103at SEQ ID no. 487with e-value of 1.2E-17 and percent identity of 30.29
MSCSVGGMEKSSTGAQQENKCSLDIFAETELRLGLPGVAAGERQRICGKRSFSEAMESRNFSIPQEEAHKFHEPNLGTEKQMVRPANDPPKMGPTPPKAQIVGWPPVKDFRKVRTIAASSSLYVKVSMDGAPYLRKVDLKMYSTYHDLSSALENMFGCLITMGKCGSSGIKESNLMDVVNGSEYVATYEDKDGDWMLVGDVPWQMFVDSCQRVRIMKASEAIGLAPRAMEK

SEQ ID NO: 502 - protein, 218 aa, Pinus taeda
  misc_feature (1)..(218): Public GI no. 32396293
  misc_feature (1)..(218)
  Functional Homolog of CDNA ID no. 13621103at SEQ ID no. 487with e-value of 6E-18 and percent identity of 35.93
MSASVGGMEKSGTSAQQENNRSLDFAETELKLGLPGVATGERQRICGKRSFSEARESRKFSIPHEEAHKFHEPNLGTEKQMVRPANDPPKMGPPPPRKAQIVGWPPVKDFRKVRTIAASSSLYVKVSMDGAPYLRKVDLKMYSTYHDLSSALENMFGCLITMGKSGSHALNESNLFDVRNGSEYVPTYEDKDGDWMLVGDVPWDMFVDSCQRMRIMKA

SEQ ID NO: 503 - protein, 359 aa, Vitis vinifera
  misc_feature (1)..(359): Public GI no. 29465672
  misc_feature (1)..(359)
  Functional Homolog of CDNA ID no. 13621103at SEQ ID no. 487with e-value of 9.9E-19 and percent identity of 36.00
MSPPLLGVGEEEGQSNVTILASSASMESVCQISSGLKERNYMGLSECSSVDSSAISTDSDGNKSSLNLKATELRLGLPGFLSPGREPELCLLSSTKLDEKPLFPLHPSKDLTYTSSQKTVVSGNKRGFADAMNGFSEGKFLANSEVNVMLSPRPSPNKENLGSQPAKMKEMASPKIVQERPRATNETPPNHTGTGNNNSSAPATKAQVVGWPPIRSFRKNTLATTSKNTEVDGKAGPGALFVKVSMDGAPYLRKVDLRNYSAYQELSSALEKMFSCFTIGQYGSHGAPGREMLSESKLKDLLHGSEYVLTYEDKDGDWMLVGDVPWQMFIETCKRLRIMKSCDAIGLAPRAVEKCKNRN

SEQ ID NO: 504 - DNA, 879 bp, Arabidopsis thaliana
  misc_feature (1)..(879): Ceres CDNA ID no. 12733452
  misc_feature (1)..(879): Also Known As  Ceres SEEDLINE ME09534
cttcttcttagtttgattcaaaaaatctccttcctcttcttactttatctcgtattatccattaatcctaaaccctttagtctctccatcttccgcttcaacaatcagaatttgggtttggcgaaagatgctaactttgaaagtgagactaatcgtttgagtaaaaaacatgcgaattttgtgtgatgcttgtgagagcgccgccgctatcgtcttttgcgccgccgacgaagctgccctctgttgctcctgcgacgaaaaagttcataagtgcaacaagctggctagtcggcatcttcgtgtaggcttagctgatccgagtaatgcaccaagctgtgacatatgcgaaaatgcacccgcattcttttactgtgagatagatggtagttccctttgtctacaatgtgatatggtggtacatgttggtgggaagagaacacataggcggtttctattactgagacagagaattgagtttccaggcgataagcctaatcatgctgaccaactgggactacggtgtcaaaaggcttcctctggtcgtggtcaagaatcaaatgggaatggtgatcatgatcataatatgatcgatcttaactccaatcctcaaagagtacacgagcctggatcacataaccaagaggagggtattgatgtaaataacgcaaacaatcacgagcatgaatagtgatcgcagatacacaagatcaagtaagaacctatgcaagaacagtatctttacagggaaatgtcttattttgttttgaagaaattagcttagaggaaacaaatatgttgttttctgaatttcttctcttttcctttcttttgtgaaatgatcaattagtggataacgattcttcagagttatatctcaaa

SEQ ID NO: 505 - protein, 172 aa, Arabidopsis thaliana
  misc_feature (1)..(172): Ceres CDNA ID no. 12733452
  misc_feature (1)..(172): Also Known As  Ceres SEEDLINE ME09534
  misc_feature (2)..(47): Pfam Name: zf-B_box Pfam Description: B-box zinc finger
  misc_feature: Phenotype: Late Flowering Useful for delaying flowering time
MRILCDACESAAAIVFCAADEAALCCSCDEKVHKCNKLASRHLRVGLADPSNAPSCDICENAPAFFYCEIDGSSLCLQCDMVVHVGGKRTHRRFLLLRQRIEFPGDKPNHADQLGLRCQKASSGRGQESNGNGDHDHNMIDLNSNPQRVHEPGSHNQEEGIDVNNANNHEHE

SEQ ID NO: 506 - protein, 120 aa, Glycine max
  misc_feature (1)..(120): Ceres CLONE ID no. 482437
  misc_feature (1)..(120)
  Functional Homolog of CDNA ID no. 12733452at SEQ ID no. 505with e-value of 3.6E-52 and percent identity of 62.57
MCNKLASRHVRVGLASPSDVPRCDICENAPAFFYCETDGSSLCLQCDMIVHVGGKRTHGRYLLFRQRVEFPGDKSSHAENPASQALEPGEAKRGQNPLPKLKMGEKQQNHRMPMVPTPGT

SEQ ID NO: 507 - protein, 211 aa, Oryza sativa subsp. japonica
  misc_feature (1)..(211): Public GI no. 52077327
  misc_feature (1)..(211)
  Functional Homolog of CDNA ID no. 12733452at SEQ ID no. 505with e-value of 2.3E-53 and percent identity of 67.26
MRTICDVCESAPAVLFCVADEAALCRSCDEKVHMCNKLARRHVRVGLADPNKVQRCDICENAPAFFYCEIDGTSLCLSCDMTVHVGGKRTHGRYLLLRQRVEFPGDKPGHMDDVAMQQKDPENRTDQKKAPHSVTKEQMANHHNVSDDPASDGNCDDQGNIDSKMIDLNMRPVRTHGQGSNSQTQGVDVSVNNHDSPGVVPTCNFEREANK

SEQ ID NO: 508 - protein, 206 aa, Zea mays
  misc_feature (1)..(206): Ceres CLONE ID no. 1548279
  misc_feature (1)..(206)
  Functional Homolog of CDNA ID no. 12733452at SEQ ID no. 505with e-value of 7.8E-53 and percent identity of 64.50
MRTICDVCESAPAVLFCAADEAALCRPCDEKVHMCNKLASRHVRVGLADPNKLVRCDICENSPAFFYCEIDGTSLCLSCDMTVHVGGKRTHGRYLLLRQRVEFPGDKPGHMDDVPMEIQDPENQRDQKKPPKEQTANHHNGDDPATDGNCDDQGNIDSKMIDLNMRPVRTHGQESNSQTQGVGLSVNNHDSPGVVPTSNSERDTSK

SEQ ID NO: 509 - protein, 211 aa, Triticum aestivum
  misc_feature (1)..(211): Ceres CLONE ID no. 727056
  misc_feature (1)..(211)
  Functional Homolog of CDNA ID no. 12733452at SEQ ID no. 505with e-value of 3.2E-21 and percent identity of 69.57
MRTICDVCESAVAVLFCAADEAALCRPCDEKVHMCNKLASRHVRVGLADPNKLVRCDICESSPAFFYCDIDGTSLCLSCDMAVHVGGKRTHGRYLLLRQRVEFPGDKPGHMDDVAMQQMESENPRDQNNAHSVEKEQMVNHHHNAYDPASDGNCNGQGAIDSKMFDLNMRPARNNGQGSSSQTHGVDHSHNNNHDSSGVVPTCNYDGATDK

SEQ ID NO: 510 - DNA, 966 bp, Arabidopsis thaliana
  misc_feature (1)..(966): Ceres CDNA ID no. 12734583
  misc_feature (1)..(966): Also Known As  Ceres SEEDLINE ME09538
atccacacacacacacatctctctctatataaccctaagtgtttggagatagcatcactagagaacacacacacaaagcatcaatatttgtctgaacggagaatgagtcctgtggcttcaacgaggtggtgtccgacgccggagcaactgatgatcttggaagagatgtaccggagtggtatacggactccgaatgcggtgcagatacaacagatcacagctcacttggcgttctatggaagaatcgagggcaaaaacgtcttttactggttccagaaccataaggctagagatagacagaagctgaggaagaaactagccaagcaacttcaccagcaacaacatcaacttcaactccaacttcagcagatcaaaccaaaaccaatatcatcgatgatttctcaaccagttaataagaatatcatcgatcatcacaatccttatcatcatcaccatcataatcatcatcataatcatcatcgtccatatgatcatatgtcctttgattgctgctctcatccttctcccatgtgtcttcctcatcagggaactggagtaggagaagctccaagcaaagtgatgaatgaatattactgcaccaaaagtggagctgaagagatattgatgcaaaaatcaatcacgggtccaaactcatcgtacggtcgagattggatgatgatgatggatatgggcccacgaccatcatatccctcatcatcatcatcacccatttcatgttgtaacatgatgatgagcagtccaaagataccattgaaaaccctggaacttttcccaatctcatctatcaactccaaacaagacagtaccaaactttaaagaaaagacaacaaatacaaaagagattctgcaggtgtttcattcatgtatcactgtatgatgtgtcaaaggctaagaagaaaacacgtgtacttgagggtaaagtaatagccgttggatataattcgt

SEQ ID NO: 511 - protein, 244 aa, Arabidopsis thaliana
  misc_feature (1)..(244): Ceres CDNA ID no. 12734583
  misc_feature (1)..(244): Also Known As  Ceres SEEDLINE ME09538
  misc_feature (5)..(66): Pfam Name: Homeobox Pfam Description: Homeobox domain
  misc_feature: Phenotype: Long Petioles Useful for making plants that grow better in shade
  misc_feature: Phenotype: Sickle Useful for modifying fruit shape, composition and seed yield
  misc_feature: Phenotype: Reduced fertility Useful for sterility, genetic confinement systems
MSPVASTRWCPTPEQLMILEEMYRSGIRTPNAVQIQQITAHLAFYGRIEGKNVFYWFQNHKARDRQKLRKKLAKQLHQQQHQLQLQLQQIKPKPISSMISQPVNKNIIDHHNPYHHHHHNHHHNHHRPYDHMSFDCCSHPSPMCLPHQGTGVGEAPSKVMNEYYCTKSGAEEILMQKSITGPNSSYGRDWMMMMDMGPRPSYPSSSSSPISCCNMMMSSPKIPLKTLELFPISSINSKQDSTKL

SEQ ID NO: 512 - protein, 275 aa, Oryza sativa
  misc_feature (1)..(275): Public GI no. 50949065
  misc_feature (1)..(275)
  Functional Homolog of CDNA ID no. 12734583at SEQ ID no. 511with e-value of 1.2E-29 and percent identity of 34.30
MAPAVQQQQSGGGGGSTGAAAVGSTTRWCPTPEQLMMLEEMYRGGLRTPNAAQIQQITAHLSTYGRIEGKNVFYWFQNHKARDRQNAAAASASPTTSSPAPTTTTTTSPPPPPSFRRRSFCRRCTPPPPPPPAAVASSTTLIPFSPPPAAAAAYTTSYYYPFTAAAAPPPPRTSPAASPLFHYNQGGGGVVLPAAEAIGRSSSSSDYSLGKLVDNFGVALEETFPAQPQQPATTMAMTAVVDTTAVAAAAGGFCRPLKTLDLFPGGLKEEQHDVV

SEQ ID NO: 513 - protein, 263 aa, Triticum aestivum
  misc_feature (1)..(263): Ceres CLONE ID no. 1316822
  misc_feature (1)..(263)
  Functional Homolog of CDNA ID no. 12734583at SEQ ID no. 511with e-value of 1.2E-36 and percent identity of 33.88
MAATATATAAATSVVTGTTRWCPTPEQLMILEEMYRGGLRTPNASQIQQITAHLAHYGRIEGKNVFYWFQNHKARDRQKLRRRLCMSHHLLSCAHYYAAANAGQYHQQQQLLGAGAVPPPLLQHPQQQQYYSASCAGGGYDQHLLPTTVPASAYAAAAGYAYPFAGVPASRCAEPSPPNTPLSFHHQGGGVVGSPEYSLGRLGNFGVVEDTCRPSRYEQQPQQLAAATEDQAAPVTATGLFCRPLKTLDLFPGAIKEEQRDVA

SEQ ID NO: 514 - protein, 286 aa, Oryza sativa subsp. japonica
  misc_feature (1)..(286): Public GI no. 55168346
  misc_feature (1)..(286)
  Functional Homolog of CDNA ID no. 12734583at SEQ ID no. 511with e-value of 2.1E-32 and percent identity of 64.81
MAPAVQQQQSGGGGGSTGAAAVGSTTRWCPTPEQLMMLEEMYRGGLRTPNAAQIQQITAHLSTYGRIEGKNVFYWFQNHKARDRQKLRRRLCISHHLLSCAHYYHHHLAAAAAVVPPPQLLPPLHPSSSSSSCGGGLIDHANSLLSPTSATTPTSAAAAAAAAAYTTSYYYPFTAAAAPPPPRTSPAASPLFHYNQGGGGVVLPAAEAIGRSSSSSDYSLGKLVDNFGVALEETFPAQPQQPATTMAMTAVVDTTAVAAAAGGFCRPLKTLDLFPGGLKEEQHDVV

SEQ ID NO: 515 - protein, 203 aa, Oryza sativa subsp. japonica
  misc_feature (1)..(203): Public GI no. 81686872
  misc_feature (1)..(203)
  Functional Homolog of CDNA ID no. 12734583at SEQ ID no. 511with e-value of 3.6E-39 and percent identity of 63.25
MPQTPSTRWCPTPEQLMILEEMYRSGVRTPNAAEIQQITAHLAYYGRIEGKNVFYWFQNHKARERQRLRRRLCARHQQQPSPPSSTVPPAPTAAAAGAVVQVHPAVMQLHHHHHHHHPYAAAAAAQSHHLQQQQQQQAEWPAAVDYCSTASASASATAADMAIPPCCRPLKTLELFPTKSTSGGLKEDCCSSSKSSSCSTSTN

SEQ ID NO: 516 - protein, 272 aa, Lycopersicon esculentum
  misc_feature (1)..(272): Public GI no. 28070968
  misc_feature (1)..(272)
  Functional Homolog of CDNA ID no. 12734583at SEQ ID no. 511with e-value of 1.3E-21 and percent identity of 27.08
MEHQHNIEDGGKNSNNSFLCRQSSSRWTPTSDQIRILKDLYYNNGVRSPTAEQIQRISAKLRQYGKIEGKNVFYWFQNHKARERQKKRLIAAASATDNNNISSMQMIPHLWRSPDDHHKYNTATTNPGVQCPSPSSHGVLPVVQTGNYGYGTLAMEKSFRECSISPPGGSYHQNLTWVGVDPYNNMSTTSPATYPFLEKSNNKHYEETLDEEQEEENYQRGNSALETLSLFPMHEENIISNFCIKHHESSGGWYHSDNNNLAALELTLNSFP

SEQ ID NO: 517 - protein, 249 aa, Glycine max
  misc_feature (1)..(249): Ceres CLONE ID no. 1472175
  misc_feature (1)..(249)
  Functional Homolog of CDNA ID no. 12734583at SEQ ID no. 511with e-value of 6.3E-20 and percent identity of 57.50
MEMESGGSNGNEGVAASSRWNPTKEQISMLENLYKQGIKTPSAEEIQQITARLRAYGHIEGKNVFYWFQNHKARQRQKQKQETFAYFNRFLHTPQPFFSPPICPNAMCAPYYIPQGQGEIGFYPPHQKVFVPVGFRRSPSEKVVPTGMISSNGPLVYEGMHQMQQRISDCSNSHFSHQETLDLFPLHPTGILEGKTTTTTDQVSSLASVVSADSSTDTTSADDINEDDHASPLNQPFFNFFTTSGQGSY

SEQ ID NO: 518 - protein, 249 aa, Glycine max
  misc_feature (1)..(249): Ceres CLONE ID no. 1508018
  misc_feature (1)..(249)
  Functional Homolog of CDNA ID no. 12734583at SEQ ID no. 511with e-value of 1.3E-18 and percent identity of 55.00
  misc_feature (61)..(61): Xaa is any aa, unknown, or other
  misc_feature (74)..(74): Xaa is any aa, unknown, or other
MEMESGGSNGNEGVAASSRWNPTKEQISMLENLYKQGIKTPSAEEIQQITARLRAYGHIEXKNVFYWFQNHKAXQRQKQKQETFAYFNRFLHTPQPFFSPPICPNAMCAPYYIPQGQGEIGFYPPHQKVFVPVGFRRSPSEKVVPTGMISSNGPLVYEGMHQMQQRISDCSNSHFSHQETLDLFPLHPTGILEGKTTTTTDQVSSLASVVSADSSTDTTSADDINEDDHASPLNQPFFNFFTTSGQGSY

SEQ ID NO: 519 - protein, 307 aa, Petunia x hybrida
  misc_feature (1)..(307): Public GI no. 61217028
  misc_feature (1)..(307)
  Functional Homolog of CDNA ID no. 12734583at SEQ ID no. 511with e-value of 9.7E-22 and percent identity of 54.76
METAQHQQNNQQHYLHQHLSIGQGTNIEDGSNKNNSSNFMCRQNSTRWTPTTDQIRILKDLYYNNGVRSPTAEQIQRISAKLRQYGKIEGKNVFYWFQNHKARERQKKRLIAAATTDNTNLPMQMQFQRGVWRSSADDPIHHKYTNPGVHCPSASSHGVLAVGQNGNHGYGALAMEKSFRDCSISPGSSMSHHHHQNFAWAGVDPYSSTTTYPFLEKTKHFENETLEADEEQQEEDQENYYYQRTTSAIETLPLFPMHEENISSFCNLKHQESSGGFYTEWYRADDNLAAARASLELSLNSFIGNSS

SEQ ID NO: 520 - protein, 281 aa, Antirrhinum majus
  misc_feature (1)..(281): Public GI no. 61216997
  misc_feature (1)..(281)
  Functional Homolog of CDNA ID no. 12734583at SEQ ID no. 511with e-value of 9E-20 and percent identity of 50.00
MEPQQQQQQQGNEQQDSQGIGKINNGSGGSSFLCRQSSTRWTPTTDQIRILKDLYYNNGVRSPTAEQIQRISAKLRQYGKIEGKNVFYWFQNHKARERQKKRFTADHHHHMNVPTIHNHHYKPPPVYNKFSNMNSGSFPSSSNGSPGFLTTPGSHVGNYGYGSVAMEKSFRECTISSTTDANVGGSMSQNIAWIGINNEYHNPYTFIDTRKYMNGYDQTLEIEEEAEENYTAEIETLPLFPMHADIKQDTADYFNGRLENGCPRASLELTLNSWFGNSKYN

SEQ ID NO: 521 - protein, 265 aa, Zea mays
  misc_feature (1)..(265): Public GI no. 39841617
  misc_feature (1)..(265)
  Functional Homolog of CDNA ID no. 12734583at SEQ ID no. 511with e-value of 3.8E-34 and percent identity of 38.93
MPQTPSTRWCPTPEQLMILEEMYRSGVRTPNAAEIQQITAHLAYYGRIEGKNVFYWFQNHKARERQRLRRRLCARHQQQYAQQQQQATAAAPASSPNSSATLLAPPAAGGSSAPCVHPAVMQLHHHHHPYATSFSMPHLGYLGQQAATVTPVLNPAAAGMVDLAGAGAGNRATGAGGAYGGGAGLYNSCSSNQLEVWDATEPMDHCNASCGAASGSSDEGGAAHLQLPACCRRPLKTLDLFPTKSTGLKDECSSSKSSSCSTSTN

SEQ ID NO: 522 - protein, 262 aa, Zea mays
  misc_feature (1)..(262): Public GI no. 61217580
  misc_feature (1)..(262)
  Functional Homolog of CDNA ID no. 12734583at SEQ ID no. 511with e-value of 7.2E-34 and percent identity of 42.98
MPQTPSTRWCPTPEQLMILEEMYRSGVRTPNAAEIQQITAHLAYYGRIEGKNVFYWFQNHKARERQRLRRRLCARHQQQYAQQQATAAAPASSPNSSATVPSLAAGGSSAGVHPAVMQLHHHQHPYATNFMPHQLGYMGQQVATVPPVLNPAAAGMVDLAAARAGGGNKATAAGSGAYGGGAGLYNSCSSNQLEEWEATDAMEHCDASCGAASGSSDEGGALQLPPCCRRPLKTLDLFPTKSTGLKDECSSSKSSSCSTSTN

SEQ ID NO: 523 - protein, 246 aa, Zea mays
  misc_feature (1)..(246): Ceres CLONE ID no. 325979
  misc_feature (1)..(246)
  Functional Homolog of CDNA ID no. 12734583at SEQ ID no. 511with e-value of 7.8E-34 and percent identity of 51.19
  misc_feature (90)..(90): Xaa is any aa, unknown, or other
MILEEMYRSGVRTPNAAEIQQITAHLAYYGRIEGKNVFYWFQNHKARERQRLRRRLCARHQQQYAQQQATAAAPASSPNSSATVPSLAAXGSSAGVHPAVMQLHHHQHPYATSFMPHQLGYMGQQVATVPPVLNPAAAGMVDLAAARAGGGNKATAAGSGAYGGGAGLYNSCSSNQLEEWEATDAMEHCDASCGAASGSSDEGGALQLPPCCRRPLKTLDLFPTKSTGLKDECSSSKSSSCSTSTN

SEQ ID NO: 524 - protein, 217 aa, Populus tremula x Populus tremuloides
  misc_feature (1)..(217): Public GI no. 3955019
  misc_feature (1)..(217)
  Functional Homolog of CDNA ID no. 12734583at SEQ ID no. 511with e-value of 4.8E-11 and percent identity of 13.89
MEEGRFQNGGGLGVKVMTDEQMEMLRKQISVYATICEQLVEMHKAVSAQQDFAGMGLGNPYCDPLLSSAVHKIGSRQRWTPKPAQLQILEQIFEQCNATPGRQKIKDITRELAQHGQISETNVYNWFQNRRARSKRKQSAVVPNNGESEMETDIESLKEKKTRAEDSQPDENTTPMADHMYFNSPDIGFDQLMGKIESPGPGSCIPYWQMEQYDLFG

SEQ ID NO: 525 - protein, 217 aa, Populus tomentosa
  misc_feature (1)..(217): Public GI no. 40233103
  misc_feature (1)..(217)
  Functional Homolog of CDNA ID no. 12734583at SEQ ID no. 511with e-value of 4.8E-11 and percent identity of 15.21
MEEGRFQNGGGLGAKVMTDEQMEMLRKQISVYATICEQLVEMHKVVSAQQDFAGMGLGNPYCDPLLSSAVHKIGSRQRWTPKPAQLQILEQIFEQCNATPGRQKIKDITRELAQHGQISETNVYNWFQNRRARSKRKQSAVVPNNGESEMETDIESLKEKKTRAEDSQPDENTTPMADHMYFNSPDIGFDQLMGKIESPGPGSCIPYWQMEQYDLFG

SEQ ID NO: 526 - DNA, 1288 bp, Arabidopsis thaliana
  misc_feature (1)..(1288): Ceres CDNA ID no. 13607033
  misc_feature (1)..(1288): Also Known As  Ceres SEEDLINE ME09540
aaaaaaagccaaactctttactctatctttatctctatctctctttctttctttctccattactctctttctctctttctaaatggaagctcttacctttatgaaattctggttaaccaacaacacaaccatcaaacctcgccgtgaaatcagaatctcagaatccgccgtcgattccaccaccggatcagaagatcccgaccttgacctctgcgaaggagaggattccttcttcgagctcaagatctctctctcggatttcaaaacacctaaagaaaaacagagactcgaaacaacaacaacaacaacaacgtactctgtttctaacaaaagcaaagtccttcctttcgttgatatctcttcaaaaccccaacaatctccgaccactcttttgaaatccggtcaaaagtttcgtgctttctcattcaagaagtcagaaaagtcaacgacgactgagaagaagaaagaagaaaacaaccgaactagtctcaacgtaagattcagagtcgacgatgaaacaacaacaacaagtttcagaaaaacagcaagcattgcgagatcacaacaaacagacgacacgatgttcgacgactctgtttcaaagagattcttcagtctcattaaacctttgtacactaaatcaacgaagaagcagtcatcgtcgacgattacatctccgacgtcttcaccggcgacgagagagaaacagaggagtaatattccgtcggggatgagaagtgtgaggagacaacttgggaagagtcggtcagcttctgcggcgatcggaggaatgtctccggcgaacagaatcgatgagtctttacaagttcaacaagatgggattcaaagtgcgattcttcattgcaagaaatcgtttcatggctcgagagaatcttctctgttatcacgatctacgagtgaatcttcttcacaagagaaacttagtacttcgtcgtctgaagattcttatttgttttcaaggatttcaagtgattcaatttcggagaaatcaatggatagcttgacttcaattaaggaacagagggagaagattagcgattaggtttaatttttttaaaatagtatgaaattaggattttttggtgattttgtgaaattagtttaaaatgaagatgatgatgatgacaaaaacagataaatcttgtggcagagagactcagattagtgaatggtcttggtttttgcctttgtatagtgatggatcattatgtgaatcctgacaccttgaggattgaaaaaactatattgtagtaaatttatatttatt

SEQ ID NO: 527 - protein, 326 aa, Arabidopsis thaliana
  misc_feature (1)..(326): Ceres CDNA ID no. 13607033
  misc_feature (1)..(326): Also Known As  Ceres SEEDLINE ME09540
  misc_feature: Phenotype: Curled 3 Useful for making plants with altered leaf shape e.g., curled leaves
MEALTFMKFWLTNNTTIKPRREIRISESAVDSTTGSEDPDLDLCEGEDSFFELKISLSDFKTPKEKQRLETTTTTTTYSVSNKSKVLPFVDISSKPQQSPTTLLKSGQKFRAFSFKKSEKSTTTEKKKEENNRTSLNVRFRVDDETTTTSFRKTASIARSQQTDDTMFDDSVSKRFFSLIKPLYTKSTKKQSSSTITSPTSSPATREKQRSNIPSGMRSVRRQLGKSRSASAAIGGMSPANRIDESLQVQQDGIQSAILHCKKSFHGSRESSLLSRSTSESSSQEKLSTSSSEDSYLFSRISSDSISEKSMDSLTSIKEQREKISD

SEQ ID NO: 528 - protein, 411 aa, Oryza sativa subsp. japonica
  misc_feature (1)..(411): Public GI no. 34904200
  misc_feature (1)..(411)
  Functional Homolog of CDNA ID no. 13607033at SEQ ID no. 527with e-value of 0.0000001 and percent identity of 20.25
METFTFLKFLRGGAVAGNKGGAVAATTIAASACEDGGGGGGGGGGGGEVDDDASFFDLEFAVPGDESAASDAEEERVEFNFSVAGDVASGGEVVTVDDAVAVAPGGECGEAKVVELVSEAAAPPASFLRPATKFRVLLLKLRKPKVPVPAECNGGGGSPAPKTNRFLIKFRVDDAPFVSLFTRDNSSRTSDAGAGAGAARPAVQALQTPEAAAITAEERRFAKEMLLKYLNKIKPLYVKVSRRYGERLRFASASEGEETDLEPDPSPSPSPSPSPAPTQPPTAAAAAAVAPAPPQPVVVACGVRAPRASVPAGLKQVCKRLGKSRSASSAVAAAPSPSLPPPPSTAGQQPQRRDDSLLQLQDGIQSAIAHCKRSFNASKVGSESPLLRSMSDTRDGGRADTKDGGGGDGGA

SEQ ID NO: 529 - protein, 410 aa, Oryza sativa subsp. japonica
  misc_feature (1)..(410): Public GI no. 56784164
  misc_feature (1)..(410)
  Functional Homolog of CDNA ID no. 13607033at SEQ ID no. 527with e-value of 8.7E-08 and percent identity of 50.63
METFTFLKFLRGGAVAGNKGGAVAATTIAASACEDGGGGGGGGGGGGEVDDDASFFDLEFAVPGDESAASDAEEERVEFNFSVAGDVASGGEVVTVDDAVAVAPGGECGEAKVVELVSEAAAPPASFLRPATKFRVLLLKLRKPKVPVPAECNGGGGSPAPKTNRFLIKFRVDDAPFVSLFTRDNSSRTSDAGAGAGAARPAVQALQTPEAAAITAEERRFAKEMLLKYLNKIKPLYVKVSRRYGERLRFASASEGEETDLEPDPSPSPSPSPSPAPTQPPTAAAAAAVAPAPPQPVVVACGVRAPRASVPAGLKQVCKRLGKSRSASSAVAAAPSPSLPPPPSTAGQQPQRRDDSLLQLQDGIQSAIAHCKRSFNASKGSESPLLRSMSDTRDGGRADTKDGGGGDGGA

SEQ ID NO: 530 - DNA, 1080 bp, Populus balsamifera subsp. trichocarpa
  misc_feature (1)..(1080): Ceres GDNA ANNOT ID no. 1467355
  misc_feature (1)..(1080)
  Functional Homolog of CDNA ID no. 13607033at SEQ ID no. 527with e-value of 1.1E-29 and percent identity of 49.46
atggaagctctctacttcctcaggttctggagacccaccaccaactcccacaaagaaaaccggccctctagtggaagcagtgatgacaccaccgagatcccattcacagattgtgaatttgaggagggagaagactcgttctttgaattggaacttactgtgcctgactttgacaccagtaaaagcagcagcagcagcaacaccaccagcataaaaaactaccacccactagacaaggaaagcaacatctttgaccctaaacaagcacctcccctcaatttagcccacaaagagagcaactccccccagcatatatttcatccaccaactctttcaactgatcatctcctttcgaagagaaaaatcctccctattgaacccgtttcattcaaacctcagtctccaatctccctactcaaatcagctccgaggtttaagatcctcatgttcaagaaatcaaagtcaatggcatcgcagaaaacagagaaaacaggggcgacagagtacttgaaagcaaataacaagaagcatgaaagcaacaagcttttcactgtcaagttcaagcttgaagaggtcacaaatatttctttcttcaccaaacagaacagcttgagaaagcagatctctcatgaatccgatgacaatgatacatcaaagcgattttcaaaggaaatgatacagaagtacttgaagctaatcaaaccattatacatcaaggtttccaagaagcatagtgacaagatgaaattctccagtgagttgtcagtcgggtctccgtcatcttctccggcaacagtgccggcgaaggagaaacaggggagttttccgtcagggattagagtggtttctaggcatcttggaaaaagcaaatcagcttcagcgaccacaggagtttctcctccagttgtgagtaggagagatgattctctgctgctacaacatgatgggattcaaagtgccatcctgcattgcaagaaatctttcaattcttcaagagattcttcttcaatgtcaagattcgtaagtgacccttcgcacgagaaatcaatgtcttcaccaaggatttcatctagtgaatag

SEQ ID NO: 531 - protein, 211 aa, Populus balsamifera subsp. trichocarpa
  misc_feature (1)..(211): Ceres GDNA ANNOT ID no. 1467355
  misc_feature (1)..(211)
  Functional Homolog of CDNA ID no. 13607033at SEQ ID no. 527with e-value of 1.1E-29 and percent identity of 49.46
MFKKSKSMASQKTEKTGATEYLKANNKKHESNKLFTVKFKLEEVTNISFFTKQNSLRKQISHESDDNDTSKRFSKEMIQKYLKLIKPLYIKVSKKHSDKMKFSSELSVGSPSSSPATVPAKEKQGSFPSGIRVVSRHLGKSKSASATTGVSPPVVSRRDDSLLLQHDGIQSAILHCKKSFNSSRDSSSMSRFVSDPSHEKSMSSPRISSSE

SEQ ID NO: 532 - protein, 400 aa, Triticum aestivum
  misc_feature (1)..(400): Ceres CLONE ID no. 914912
  misc_feature (1)..(400)
  Functional Homolog of CDNA ID no. 13607033at SEQ ID no. 527with e-value of 1.3E-07 and percent identity of 45.88
MESFSLLKYLRGGAVAGNQRTAVPATTIAALACEEVGEGGGSGGGADVVEDDAAFFDLEFAVPGDESAASDAEEERVEFNFSVAGDAASGGEVVAVEPVVPVSEAENGVGKEAEPAATAEAPAASFLRPATKFRVLLLKLRKPKVPVPAEGNAGGAAGGSPAPKTNRFLIKFRVDDAPFVSLFTRDNSSRTSDAGAGTGAARPAVQAPQPSDAVAITAEERRFAKEVMLKYLNKIKPLYVKVSRRYGERLRFAGASEGEETDAEPEPSPSPSATPSPAPSQPRAAPAPPPQPVVVACGVRAPRASVPAGLKQACKRLGKSRSASSAVAAAPSPSATSPTPAQPQRRDDSLLQLQDGIQGAIAHCKRSFNASKGSESPLLRSMTEPKADGAADTKDGVDGA

SEQ ID NO: 533 - protein, 330 aa, Glycine max
  misc_feature (1)..(330): Ceres CLONE ID no. 1237838
  misc_feature (1)..(330)
  Functional Homolog of CDNA ID no. 13607033at SEQ ID no. 527with e-value of 7.5E-29 and percent identity of 31.58
MDALNFLKFWRNATMSTTSEPHLVVETDTESDEDDSFFDLELTPLDFDNKENNTNTTTTKNDDDPKQTTTSELKSLGSKDNLLSKTDNGVQRKTPLPLSPPSEPISKRKVLPIEPISKPQSPIALLRSAPSFRIFMFRKRNRTPPQQKTEHSVNEAKVFAVKLSVDDFRSSPALSRDNSTRSFGSKVRGLSYEEEPKPERFSKEVLRKYLKLIKPLYVKVSKRYSDKVRFSGEGYAASPSSSPSVASVSSRTEKQGKGMRVVSKHLGKSRSASSTVAGVSSPAKKSDDTMQQQLDGIQSAILHCKRSFNSREGSMYSVRKSFDGEHGEKV

SEQ ID NO: 534 - DNA, 814 bp, Arabidopsis thaliana
  misc_feature (1)..(814): Ceres CDNA ID no. 12718480
  misc_feature (1)..(814): Also Known As  Ceres SEEDLINE ME09546
gagctagctaaagacactctcgccggagagacatggccgggagatcttcgccgggaaaatgctccacgtggcttgacctgaacagagaagaaacagtggagaagaacaatgaagaagagtcatcagtggaagacgaagaccaaatcacgaataacgttagacagtatattcggtccaacatgcctcggcttcgttggacgcctgatcttcatctctccttcgttcgtgctgtccaacgactaggcggtccagacagagcgacgccgaaattggttcttgagatgatgaatctaaaaggattgagtattgcacatgtcaagagtcatttacagatgtatcgaagtaagaagctcgagccgtcttctcgccctggatttggagctttcatgagtggacaaagaagctatttgatggacatgatcgactctcgatgtatccctcatagcgatttaagacatgcctataactctaaaaccgttccttcgagggtactcaatcaagacgcggtcgttacaaatcttggaggtaactttcttatgcgaccttcgagctggtttagcgggttatgcagaaatgaccgagacagcacagagaacaagactctgcctctactcgagattaggaagaagaacaatgagaaaagagtccgagatgaagaagtatcatcagtcaaacgattgaaatcaatgtccggaggtgggatacagttgcctgagtttggaaattgcaggcaaaaaccaacagatgatatcaacacaatgctctcgctctctctgttgtcgacatcatcagaaccgtaaccaacatactagag

SEQ ID NO: 535 - protein, 255 aa, Arabidopsis thaliana
  misc_feature (1)..(255): Ceres CDNA ID no. 12718480
  misc_feature (1)..(255): Also Known As  Ceres SEEDLINE ME09546
  misc_feature (52)..(103): Pfam Name: Myb_DNA-binding Pfam Description: Myb-like DNA-binding domain
  misc_feature: Phenotype: Curled 4 Useful for making plants with altered leaf shape e.g., curled leaves
MAGRSSPGKCSTWLDLNREETVEKNNEEESSVEDEDQITNNVRQYIRSNMPRLRWTPDLHLSFVRAVQRLGGPDRATPKLVLEMMNLKGLSIAHVKSHLQMYRSKKLEPSSRPGFGAFMSGQRSYLMDMIDSRCIPHSDLRHAYNSKTVPSRVLNQDAVVTNLGGNFLMRPSSWFSGLCRNDRDSTENKTLPLLEIRKKNNEKRVRDEEVSSVKRLKSMSGGGIQLPEFGNCRQKPTDDINTMLSLSLLSTSSEP

SEQ ID NO: 536 - DNA, 1479 bp, Arabidopsis thaliana
  misc_feature (1)..(1479): Ceres CDNA ID no. 13592772
  misc_feature (1)..(1479): Also Known As  Ceres SEEDLINE ME09705
  misc_feature (1)..(1479): Also Known As  Ceres CLONE ID no. 122635
acacacatataacaatctcttcttctctgacattacacaatggtggtttgagtttacagaagataataatggggaaaactagcaaatggtttcgaagtctcttaaccggaaagaaagagagaacaaaggaacatatcattcaaagcgagtgtgtattcacttcttccattccaggcactcctaaggagaaacgtcgatggagttttcgacgttcttcagcaactggaccaccgccaccagcttgtgctattacactgaaagattcaccaccaccgccgccaccaccacctccacctccaccgctacaacaaccatttgtggtcgaaatcgtggacaatgaagatgaacaaatcaagaacgtttcagctgaagagattgaagaatttgcagcaataaagattcaagcgtgctatcgttctcatttggcgaggaaagcattaagagcattaaaagggttagtgaaattacaagcactagtgagaggtcatttagtaaggaaacaagcaacagctacacttagatgtatgcaagcattaataacacttcaagccaaagctcgagaacagaggattcgtatgatcggaggagattcaacaaatccaagaacatcgattcacaaaaccaggatcaataacttttaccacgagaatgaagaaaacatcaagattgtggaaatggacattcaatcgaaaatgtactctccggctccttcggctttaaccgagatgagtcctcgcgcgtatagtagccatttcgaggattgtaactcattcaacacagctcaaagtagtccacaatgtttcagcagattcaaagagtattacaatggagatactttgtcttcttatgattaccctctcttccctaattacatggctaatactcagtcttctaaagccaaggctcggtctcaaagtgcgccgaagcagagacctcctgagatctatgagaagcagatgagtgggaggagaagatcttcgatggaagcaccgaggaataacggtgtcccgagagctgtaaggatgcagagatcttcatctcaactagggtcaaacacagccaaggaaagtcaacaacatcatcatcatcagtactatccgtggatggcgataaagctcgatagatctaatatttcgcttatggagagcgaatgcggatctacaagtaccgttatgactaataccaactacggtagacatgttgatgttcagggaaacaacaacatgtactgaacactgtgctttagaatttgagagattgctggaaaaataggcaagcctaaaaaacgaagaggacaggtttataggagtttttttatgatgatggagatttaacaatctctatatgtaaagcaaaaaatgtagtagactgtagaagtgactcatctcgtcttaaattttgatttttcctttttaattatcattcgaattaacgttaacagtatttgtcaaattcatggatgttactatgttcaaaacc

SEQ ID NO: 537 - protein, 387 aa, Arabidopsis thaliana
  misc_feature (1)..(387): Ceres CDNA ID no. 13592772
  misc_feature (1)..(387): Also Known As  Ceres SEEDLINE ME09705
  misc_feature (1)..(387): Also Known As  Ceres CLONE ID no. 122635
  misc_feature (127)..(147): Pfam Name: IQ Pfam Description: IQ calmodulin-binding motif
  misc_feature: Phenotype: Large Useful for making larger plants
  misc_feature: Phenotype: Oval Shaped Useful for making plants with increased biomass and foliage
  misc_feature: Phenotype: Tall Useful for making taller plants and plants with longer inflorescences
MGKTSKWFRSLLTGKKERTKEHIIQSECVFTSSIPGTPKEKRRWSFRRSSATGPPPPACAITLKDSPPPPPPPPPPPPLQQPFVVEIVDNEDEQIKNVSAEEIEEFAAIKIQACYRSHLARKALRALKGLVKLQALVRGHLVRKQATATLRCMQALITLQAKAREQRIRMIGGDSTNPRTSIHKTRINNFYHENEENIKIVEMDIQSKMYSPAPSALTEMSPRAYSSHFEDCNSFNTAQSSPQCFSRFKEYYNGDTLSSYDYPLFPNYMANTQSSKAKARSQSAPKQRPPEIYEKQMSGRRRSSMEAPRNNGVPRAVRMQRSSSQLGSNTAKESQQHHHHQYYPWMAIKLDRSNISLMESECGSTSTVMTNTNYGRHVDVQGNNNMY

SEQ ID NO: 538 - DNA, 1344 bp, Populus balsamifera subsp. trichocarpa
  misc_feature (1)..(1344): Ceres GDNA ANNOT ID no. 1512677
atggggaagtcaggcaaatggcttaaaagtttcttgacagggaagaaagacaaggagagggagaagaaggtgaccccaatctcgatcccacctgctactcctaaagaaaaaagaagatggagttttcgcagatcatcagccactgcagctgctcccaaggactcgaattctacagaaccaattgccaccacacaaccagctgcggtgcagggaacgttggattcagataatgaacagaaaatgcacgcgatggctatggcagctgctgcggatgcagctatggccgctgcacaggctgcagctgctgtgatccgtctaactactgccacctccaggagaaacagtacaatcgaagaggatgctgccgtaaaaattcaatcagtctttcgatcttatttggcaagaaaagcattatgtgcattgaaaggcttagtgaagttgcaggcactcgtgaggggtcacctggtgaggaaacaggcaactgctacactcaggtgcatgcaggcattggtgaatgtacagactagagctcgggctcagaggatctggatggctgaagacgtaaagcccagccagaggaattcgatccacagaaaatcgacacaagagaataggattaggcacacaaatgatgagaatgatagaggcatggatcaggagaacatcaagattgtagaggtggatgttggagaatcgaagggaagtataaagagcagaaatggcttctctcatcgtccacaaacagatctaacagagcatagattttccacacattatgcctcaaatcatgcgtacttgaagaaagagaaccaccagatctctccagctccatcagctctaacagatatgagccccagtgcttgcagtgggcattttgaggaaaattccttcagcacagcacatagcagccctcagtactactctgcagtatcaaaacctgatccatcaagaattccattcgccttaccaaggccagagtacgcagaatctctgtcctatgactacccattatttccaaattacatggcaaacacagaatctttcagggccaaagttcggtcacatagtgcaccaaaacaaaggccagactcatttgagaggcaaccaagtaggaagagggcatcaatagagggaaggaatgtcccaaggcctatgcggatgcagcggtcgtcttccaatgttggagccacagctcaaggctatatatatccatggtcaattaagcttgacagaacaacagtatcacttagagatagtgagtgcggatccacaagtacagtgctcacaaacaccaatgactgcagttctcttgttggatttgaagtaagcatcagccatccttaa

SEQ ID NO: 539 - protein, 367 aa, Populus balsamifera subsp. trichocarpa
  misc_feature (1)..(367): Ceres GDNA ANNOT ID no. 1512677
  misc_feature (1)..(367)
  Functional Homolog of CDNA ID no. 13592772at SEQ ID no. 537with e-value of 1.9E-59 and percent identity of 68.38
MHAMAMAAAADAAMAAAQAAAAVIRLTTATSRRNSTIEEDAAVKIQSVFRSYLARKALCALKGLVKLQALVRGHLVRKQATATLRCMQALVNVQTRARAQRIWMAEDVKPSQRNSIHRKSTQENRIRHTNDENDRGMDQENIKIVEVDVGESKGSIKSRNGFSHRPQTDLTEHRFSTHYASNHAYLKKENHQISPAPSALTDMSPSACSGHFEENSFSTAHSSPQYYSAVSKPDPSRIPFALPRPEYAESLSYDYPLFPNYMANTESFRAKVRSHSAPKQRPDSFERQPSRKRASIEGRNVPRPMRMQRSSSNVGATAQGYIYPWSIKLDRTTVSLRDSECGSTSTVLTNTNDCSSLVGFEVSISHP

SEQ ID NO: 540 - DNA, 1344 bp, Populus balsamifera subsp. trichocarpa
  misc_feature (1)..(1344): Ceres GDNA ANNOT ID no. 1459412
atggggaagtcaggcaaatggcttaaaagtttcttgacagggaagaaagacaaggagagggagaagaaggtgaccccaatctcgatcccacctgctactcctaaagaaaaaagaagatggagttttcgcagatcatcagccactgcagctgctcccaaggactcgaattctacagaaccaattgccaccacacaaccagctgcggtgcagggaacgttggattcagataatgaacagaaaatgcacgcgatggctatggcagctgctgcggatgcagctatggccgctgcacaggctgcagctgctgtgatccgtctaactactgccacctccaggagaaacagtacaatcgaagaggatgctgccgtaaaaattcaatcagtctttcgatcttatttggcaagaaaagcattatgtgcattgaaaggcttagtgaagttgcaggcactcgtgaggggtcacctggtgaggaaacaggcaactgctacactcaggtgcatgcaggcattggtgaatgtacagactagagctcgggctcagaggatctggatggctgaagacgtaaagcccagccagaggaattcgatccacagaaaatcgacacaagagaataggattaggcacacaaatgatgagaatgatagaggcatggatcaggagaacatcaagattgtagaggtggatgttggagaatcgaagggaagtataaagagcagaaatggcttctctcatcgtccacaaacagatctaacagagcatagattttccacacattatgcctcaaatcatgcgtacttgaagaaagagaaccaccagatctctccagctccatcagctctaacagatatgagccccagtgcttgcagtgggcattttgaggaaaattccttcagcacagcacatagcagccctcagtactactctgcagtatcaaaacctgatccatcaagaattccattcgccttaccaaggccagagtacgcagaatctctgtcctatgactacccattatttccaaattacatggcaaacacagaatctttcagggccaaagttcggtcacatagtgcaccaaaacaaaggccagactcatttgagaggcaaccaagtaggaagagggcatcaatagagggaaggaatgtcccaaggcctatgcggatgcagcggtcgtcttccaatgttggagccacagctcaaggctatatatatccatggtcaattaagcttgacagaacaacagtatcacttagagatagtgagtgcggatccacaagtacagtgctcacaaacaccaatgactgcagttctcttgttggatttgaagttcgtggaaataggtactaa

SEQ ID NO: 541 - protein, 367 aa, Populus balsamifera subsp. trichocarpa
  misc_feature (1)..(367): Ceres GDNA ANNOT ID no. 1459412
  misc_feature (1)..(367)
  Functional Homolog of CDNA ID no. 13592772at SEQ ID no. 537with e-value of 1.9E-59 and percent identity of 68.38
MHAMAMAAAADAAMAAAQAAAAVIRLTTATSRRNSTIEEDAAVKIQSVFRSYLARKALCALKGLVKLQALVRGHLVRKQATATLRCMQALVNVQTRARAQRIWMAEDVKPSQRNSIHRKSTQENRIRHTNDENDRGMDQENIKIVEVDVGESKGSIKSRNGFSHRPQTDLTEHRFSTHYASNHAYLKKENHQISPAPSALTDMSPSACSGHFEENSFSTAHSSPQYYSAVSKPDPSRIPFALPRPEYAESLSYDYPLFPNYMANTESFRAKVRSHSAPKQRPDSFERQPSRKRASIEGRNVPRPMRMQRSSSNVGATAQGYIYPWSIKLDRTTVSLRDSECGSTSTVLTNTNDCSSLVGFEVRGNRY

SEQ ID NO: 542 - protein, 388 aa, Glycine max
  misc_feature (1)..(388): Ceres CLONE ID no. 523802
  misc_feature (1)..(388)
  Functional Homolog of CDNA ID no. 13592772at SEQ ID no. 537with e-value of 7.7E-59 and percent identity of 56.67
MCLLSGTSTPVSTTTTTTKEKRRWSFRRSSASRELNLAEFGVIASSVTVQNDQNAENDQRKHDPDSNGLSTRCVEEAAAIKIQSVFRSYLARKALYALRGLVKLQALVRGHLVRKQARETLRCMQALVIAQSRARAQRARMVSDGKLDQKLSPNRITTEENFSMHMYNEMHNGLEENAMIVEMAVCESKGNSRGRNSSVNREPSDHRFSAYYSSNGSYSKEENYNASPAPSTLTELSPRACSGHFEECSFSTAQSSPYYYSEVSGVDNTITKVPFAFPIPAYTEPMSYDYPLFPNYMANTKSSRAKARSQSAPKSRPDSYERQPSRRRASMEGRNVPKPVRMQRSSSHVGVTAQNYQYPCSIKLDRSIVSECGSTSTVLTNTNSNYCT

SEQ ID NO: 543 - protein, 417 aa, Oryza sativa subsp. japonica
  misc_feature (1)..(417): Public GI no. 22773261
  misc_feature (1)..(417)
  Functional Homolog of CDNA ID no. 13592772at SEQ ID no. 537with e-value of 1.1E-45 and percent identity of 46.20
MGKAGRWLRSFLAGGKKGGKKGEAMAAALPGEAAKEKRWSFRRPVHGEKAAAEAAAAADGVVVGEAEAGFDLSASESEFDQKRHAMAVAVATAAAADAAVAAAHAAAAAVRLSSRKAHQLPASAVEEAAAVRIQATFRGYLARTALCALRGIVKLQALVRGQLVRKQATATLRCMQALLAAQSQLRAQAQRVRALHEHHRTPPRPRPPSPPQHPRHRRSYEMDRSCEENAKIVEVDSGAGEPARRGGEYGHHGRWSPAPSAMTEVMSPRAYSGHFEDMAFAATAHSSPHHASASSELLCCPSYMANTESSRAKARSQSAPRQRTDALERQPSRRKSGGGGGGAKMQRSSSSHAAAAQRGAQFPWPVIKLDTSSASLKDSECGSTSSVLTAATVYSRTRSLVGFEVSYDFRDIVHVFF

SEQ ID NO: 544 - DNA, 1212 bp, Arabidopsis thaliana
  misc_feature (1)..(1212): Ceres CDNA ID no. 13614632
  misc_feature (1)..(1212): Also Known As  Ceres SEEDLINE ME09710
ctgtgactgtgagtgaagaagataatgcagactcaccttttggtgggacctatcccactcaaaggctaccgtcgattctcttcctcctccttctccggcgatctcctccctccgtcgtctaaccctatcggccgagacctattccctcaccgtcgaaggcaccgcgacggcaaatctcggagttaccgtaatcgctcgaaaacgacgattactagtgctgcgttttcttcaagttctaataccggcgggcagaatcattacgctgttttgggcatcgctcgaaacgccacacaaggtgacatcaagagagcttatcgtttgctagctcgaaagtttcatcctgatgttaataaggactctaaagccggagagctattcaagagtgtccgttgttcctacgaagtactatctaatgaagctacaaggactcagtacgacagagcacttaaacttcaagaaaattcccggttccatagagtgaaaaggcacagctacacccctgaggttgaagatgccatgaagtattactacacctggtctgagaaaagacaaagatccagacacgggagattctatggacactattctacatatccaaactcacatttctacgctgagaccgagccgcaagaagaagaaggagtagaaacagcaccagaccagcgagactcatttgttgaagctctcaaatccgccttcttatcgatgtttcttctatatacattcggttgcctagcatctctcacatttagcacattcacagcgttgctcgacaaggaactcgacatgggttacaaagtcggattcatgatcgcttggatacttggcggaaaaggcggtatccttcttactctctgcttaacatttgcaagctggctctgtgggaaagcaagcagcagcgtggtggttcttgtgttagtagcaatgtgggttggctctaatttagctagacatgctcctcttccacaaggtgctcttctcaccctcctctacatgtcaatcaaacttcaagtcgactcaacctgaatcttctgtaagtttccactacgttttagattgtaaatagctaagttacattatttgtatcctatgatttgggtcttggagaaaaatgattagtagtaaagagaagaaattgcttgaaggttacaaactctttgttattctttttccaagattacaaatcaatgaatcaaaagttacaaaattcag

SEQ ID NO: 545 - protein, 333 aa, Arabidopsis thaliana
  misc_feature (1)..(333): Ceres CDNA ID no. 13614632
  misc_feature (1)..(333): Also Known As  Ceres SEEDLINE ME09710
  misc_feature (77)..(141): Pfam Name: DnaJ Pfam Description: DnaJ domain
  misc_feature: Phenotype: WHOLE PLANT Useful for making bigger plants
  misc_feature: Phenotype: Weak Useful for making stronger plants
MQTHLLVGPIPLKGYRRFSSSSFSGDLLPPSSNPIGRDLFPHRRRHRDGKSRSYRNRSKTTITSAAFSSSSNTGGQNHYAVLGIARNATQGDIKRAYRLLARKFHPDVNKDSKAGELFKSVRCSYEVLSNEATRTQYDRALKLQENSRFHRVKRHSYTPEVEDAMKYYYTWSEKRQRSRHGRFYGHYSTYPNSHFYAETEPQEEEGVETAPDQRDSFVEALKSAFLSMFLLYTFGCLASLTFSTFTALLDKELDMGYKVGFMIAWILGGKGGILLTLCLTFASWLCGKASSSVVVLVLVAMWVGSNLARHAPLPQGALLTLLYMSIKLQVDST

SEQ ID NO: 546 - DNA, 999 bp, Populus balsamifera subsp. trichocarpa
  misc_feature (1)..(999): Ceres GDNA ANNOT ID no. 1523115
atgcaagcgcgcctcctcctggtgggacctatccccaccacaatcgacgcctctgcttcattctcctcctccagctccatcatcaccggtggccgcaattccctgatcggtagctggatctaccatcctaaccttgacaataaatcccgccatcgcaaaaacaacaaatggggctcgacagtggtagttgcatcatcatcgtcatcatgggcagcaatcaacggcggcgagcaagaccattacgcggtgctgggactcgagcggaccgccacttcagccgatattaaaaaagcttatcgctttcttgctcgaaagtatcatcctgatgtcagcaagcattcacaagctggtgagctgttcaagagcattcggcatgcatacgaaatactctctaatgaagtgacaaggactcagtatgatcgagtacttaggtttcaagaagaaactggcaggtcatatagcaaaaaccaatactatgcacctgaagttgaaaactgggtaaggatatacaggtgggctgaaatgaagcggaaaacgaggagcgagagatatagggagcattataacgtgagtgaggatccttccttctacagtgagacagaagaggaagccgaagaaggaagcctagatcaggaaagaggcccttttagcgaagtgctaagatctgcatttatctctctcttcttactgcatacttttggatctctattatctctcgccttcagcagtctcatggctttgttcgacagacaattggatgctgggtataagattggttatttgattgcatggattttgggtgggagaggtgggatttcgcttgttctgtgtctccaatttgctagctgggcatgtggaaagaggagcagcagcatggttgctctggtagtggtagccatgtgggttggttcaaatcttgctaggtttgctccactcccgcaaggtgctcttgttacacttctgtacatgtctattaagctgcaagcggacctaaattga

SEQ ID NO: 547 - protein, 332 aa, Populus balsamifera subsp. trichocarpa
  misc_feature (1)..(332): Ceres GDNA ANNOT ID no. 1523115
  misc_feature (1)..(332)
  Functional Homolog of CDNA ID no. 13614632at SEQ ID no. 545with e-value of 2E-85 and percent identity of 56.62
MQARLLLVGPIPTTIDASASFSSSSSIITGGRNSLIGSWIYHPNLDNKSRHRKNNKWGSTVVVASSSSSWAAINGGEQDHYAVLGLERTATSADIKKAYRFLARKYHPDVSKHSQAGELFKSIRHAYEILSNEVTRTQYDRVLRFQEETGRSYSKNQYYAPEVENWVRIYRWAEMKRKTRSERYREHYNVSEDPSFYSETEEEAEEGSLDQERGPFSEVLRSAFISLFLLHTFGSLLSLAFSSLMALFDRQLDAGYKIGYLIAWILGGRGGISLVLCLQFASWACGKRSSSMVALVVVAMWVGSNLARFAPLPQGALVTLLYMSIKLQADLN

SEQ ID NO: 548 - DNA, 1468 bp, Arabidopsis thaliana
  misc_feature (1)..(1468): Ceres CDNA ID no. 13593033
  misc_feature (1)..(1468): Also Known As  Ceres SEEDLINE ME09881
aaacttttgtctctttttaactctcttaactttcgtttcttctcctaccttcttttaccaacctttcctttctcttacacacatatatatatacatatatagagagagagaagaggacaaagagttgaaagatgaagactctcatgtcttcatagaaacaagtgatatgtgcgctaagaaagaagaagaagaagaagaagaagaagacagttctgaagccatgaacaacatacaaaattaccaaaatgacctcttctttcaccaactcatctctcatcatcaccatcatcatcatgatccttctcaatctgaaactttgggagcatccggtaacgttggatctggtttcactatcttctctcaagattccgtctctccaatatggtctctacctccacctacctcgatccaaccaccatttgatcagtttcctcctccttcttcttctccagcatctttctacggaagtttcttcaacagaagtcgagctcatcatcagggattacagtttgggtacgagggttttggtggagccacgtcagcagcacatcatcatcatgaacaacttcggatcttgtcggaagctttaggtccggtagtacaagccgggtccggtccttttgggttacaagctgagttagggaagatgacagcacaagagatcatggacgctaaagctttggctgcttcaaagagtcatagtgaagctgagagaagaagaagagagagaatcaataatcatctcgctaagctccgtagcatattacccaacaccaccaaaacggataaagcgtcgttactagctgaagtgatccaacatgtgaaagagttgaagagagagacttcagtgatctcagagacaaatcttgtcccaacggaaagcgatgagttaacggtagctttcacggaggaggaagaaaccggagatggcagatttgtaattaaagcgtcgctttgctgtgaagacaggtcggatctcttgcctgacatgattaaaacattgaaagctatgcgtctcaaaacgctcaaggcggagataaccaccgttgggggacgagtcaagaacgttttgtttgttaccggagaagagagctccggtgaggaagtggaggaagagtactgtatagggacgattgaggaagctttgaaagcggtgatggagaagagcaatgtagaggaatcatcttcttctggaaatgctaagagacagagaatgagtagtcacaacactatcactatcgtcgaacaacaacaacaatataatcagaggtaatcaattttttacttaaatcgctttttttttcttactttcggtgtatctactacgtgtgttgtttgctggttatggaaatgaatgttgtacgtcacgttatactatagatatatgtgtgtttgtgtgtatgtataacggaagtatttgtatccgttgtggtcttggacttttggtttggttctaagatacttattt

SEQ ID NO: 549 - protein, 368 aa, Arabidopsis thaliana
  misc_feature (1)..(368): Ceres CDNA ID no. 13593033
  misc_feature (1)..(368): Also Known As  Ceres SEEDLINE ME09881
  misc_feature (174)..(223): Pfam Name: HLH Pfam Description: Helix-loop-helix DNA-binding domain
  misc_feature: Phenotype: Curled 5 Useful for making plants with altered leaf shape e.g., curled leaves
  misc_feature: Phenotype: Oval Shaped Useful for making plants with increased biomass and foliage
MCAKKEEEEEEEEDSSEAMNNIQNYQNDLFFHQLISHHHHHHHDPSQSETLGASGNVGSGFTIFSQDSVSPIWSLPPPTSIQPPFDQFPPPSSSPASFYGSFFNRSRAHHQGLQFGYEGFGGATSAAHHHHEQLRILSEALGPVVQAGSGPFGLQAELGKMTAQEIMDAKALAASKSHSEAERRRRERINNHLAKLRSILPNTTKTDKASLLAEVIQHVKELKRETSVISETNLVPTESDELTVAFTEEEETGDGRFVIKASLCCEDRSDLLPDMIKTLKAMRLKTLKAEITTVGGRVKNVLFVTGEESSGEEVEEEYCIGTIEEALKAVMEKSNVEESSSSGNAKRQRMSSHNTITIVEQQQQYNQR

SEQ ID NO: 550 - protein, 353 aa, Glycine max
  misc_feature (1)..(353): Ceres CLONE ID no. 563805
  misc_feature (1)..(353)
  Functional Homolog of CDNA ID no. 13593033at SEQ ID no. 549with e-value of 2.3E-82 and percent identity of 57.18
MIQEDQGQCSSQAINNYHQAYQEQLLLQQQMQQQQQNNDIFGGGGGLNMYPGAEVSPIMNHHHQPWSMTMPHHHHHHQVHDPFLVPPQPSPYASLFNRRGPSLHQFAYDHHGSSSDHLRIISESLVGPVVQPGSAVPFGLQTELAKMTAQEIMEAKALAASKSHSEAERRRRERINNHLAKLRSLLPSTTKTDKASLLAEVIQHVKELKRQTSVIAETSPVPTEADELTVVDEADEDGNSVIKASLCCEDRSDLFPELIKTLKALRLRTLKAEITTLGGRVKNVLFITGEEADSSSGSTEDHSHHHHQQQQQQYCINSIQEALKAVMEKSVGDHHESASANIKRQRTNIISMS

SEQ ID NO: 551 - protein, 363 aa, Oryza sativa subsp. japonica
  misc_feature (1)..(363): Public GI no. 50252324
  misc_feature (1)..(363)
  Functional Homolog of CDNA ID no. 13593033at SEQ ID no. 549with e-value of 1.3E-49 and percent identity of 43.43
MWEGGSHDAAAQLLPWFVGEPAAAAVGGYGGCVDVVGQGGVFGFGFEAAAAPVVTRQQRGGAAAAEGSSRGGGGKPAVVSGLLGSLQAELGRVTAREIMDAKALAASRSHSEAERRRRQRINGHLARLRSLLPNTTKTDKASLLAEVIEHVKELKRQTTAIAAAAAAGDYHGNDEDDDDAVVGRRSAAAQQLLPTEADELAVDAAVDAEGKLVVRASLCCEDRPDLIPDIARALAALRLRARRAEITTLGGRVRSVLLITADEQQQQHCDDVDDDEDGHRLLLRHGIDGAGAAADDDDECAASHRRHECIATVQEALRGVMDRRAAASSGDTSSSGGAVVAGGGGGSIKRQRMNYGVHEQCSV

SEQ ID NO: 552 - protein, 345 aa, Oryza sativa subsp. japonica
  misc_feature (1)..(345): Public GI no. 50946029
  misc_feature (1)..(345)
  Functional Homolog of CDNA ID no. 13593033at SEQ ID no. 549with e-value of 9.3E-53 and percent identity of 44.84
MWEAVGGGDGTALLPWPGSAAAAPLYMPPAAAAAAPFAAGEQLPVEQPFYFDGGGGVAGHNHHPHHHQYGMEAPPPMTMMQMGGGGSSSSRMVVSGLLGTLQAELGRMTAKEIMDAKALAASRSHSEAERRRRQRINGHLARLRSLLPNTTKTDKASLLAEVIEHVKELKRQTSAMMEDGAAGGEAAAAPVVLLPTEDDELEVDAAADEGGRLVARASLCCEDRADLIPGIARALAALRLRARRAEIATLGGRVRSVLLIAAVEEEDPDEAGNDDDGEHGYGVAASHRRHELVASIHEALRGVMNRKAASSDTSSSGAGGGGGSIKRQRMISAHDQQGSFNSSGW

SEQ ID NO: 553 - protein, 248 aa, Zea mays
  misc_feature (1)..(248): Ceres CLONE ID no. 359116
  misc_feature (1)..(248)
  Functional Homolog of CDNA ID no. 13593033at SEQ ID no. 549with e-value of 3.1E-30 and percent identity of 33.22
  misc_feature (77)..(77): Xaa is any aa, unknown, or other
  misc_feature (167)..(167): Xaa is any aa, unknown, or other
MGAYACDGVGVGGLGHGGVFGFGFDAAVQQQQQQQRAADGSGKAVVVSGLLGSLQAELGRMTAREMMDAKALAASRXHSEAERRRRQRINGHLARLRSLLPNTTKTDKASLLAEVLDHVKELKRQTSAMMAATDADADADDEGAGRTQAQAQAQLLPTEADELCVDXGADWRRPARGARVALLRGPPGPHPGHRPRAGRPPDARAPGRDHHARRARPQLAPHHRGQESGRPARRRRRRRRRRRRGGGG

SEQ ID NO: 554 - DNA, 801 bp, Populus balsamifera subsp. trichocarpa
  misc_feature (1)..(801): Ceres GDNA ANNOT ID no. 1466509
atggtatcgcaaactttgatgttggatgctgagaagggagaactattaaaagcacctgcaagaattgggaagatggggatatctgaggccaaggctttcgcagctttgaagagccatagcgaggccgagaggaggaggagagagaggatcaatgctcatcttgctactcttcgcggtcttgtgccctgcactgaaaagatggacaaggccacattgcttgctgcagtcattagccaagtcaaagaacacaaaaagaatgcattagaagcctgtaaaggtcttcttgttccaatggatgatgatgaagtaaaagtggagacatattttgacgggactttgcatttcaaggcatctatctgctgtgactatcgacctgagcttctttccgatttacgaaatgctattgatgctcttcctttgaaaacggtgagcgcagaaatatcaaccttgggaagccggctaaagaatgagttcgtactcaccaacagaagaaataagaatgctttagatgatgctggggcaatacagcttcttacaaattctattcatcaaaccctaacatctgtcatggagaaaggttctgcctcaccaaaatactcaccaaggacaaaacttccaaacaagaggaggaggtacatattggatgccaaagatgctgctgctgctgccaagagtagtatgggagtagctcccagcctcccaccatcactggggactagcctctgggccgatgaggtggtatcatgttcgagccctgtggttgctcatatgatggccactggaggtttacatggtcgttaa

SEQ ID NO: 555 - protein, 266 aa, Populus balsamifera subsp. trichocarpa
  misc_feature (1)..(266): Ceres GDNA ANNOT ID no. 1466509
  misc_feature (1)..(266)
  Functional Homolog of CDNA ID no. 13593033at SEQ ID no. 549with e-value of 1.8E-29 and percent identity of 46.63
MVSQTLMLDAEKGELLKAPARIGKMGISEAKAFAALKSHSEAERRRRERINAHLATLRGLVPCTEKMDKATLLAAVISQVKEHKKNALEACKGLLVPMDDDEVKVETYFDGTLHFKASICCDYRPELLSDLRNAIDALPLKTVSAEISTLGSRLKNEFVLTNRRNKNALDDAGAIQLLTNSIHQTLTSVMEKGSASPKYSPRTKLPNKRRRYILDAKDAAAAAKSSMGVAPSLPPSLGTSLWADEVVSCSSPVVAHMMATGGLHGR

SEQ ID NO: 556 - protein, 310 aa, Oryza sativa
  misc_feature (1)..(310): Public GI no. 29466635
  misc_feature (1)..(310)
  Functional Homolog of CDNA ID no. 13593033at SEQ ID no. 549with e-value of 1.6E-08 and percent identity of 19.03
MDAEMAMGESFAYYWETQRYLESEELDSMYLPTQDDSNYESSSPDGSHSSSAPAPAAVGGDAAAAVAGSGGGMTTMMMGGGGGGGDDAGGANKNILMERDRRRKLNEKLYALRSVVPNITKMDKASIIKDAIEYIQRLQAEEQQMLREVAALESAAAASAAPAAANPFAGLGADEEHEYGHHHPSSSSERTKKVKRALSVSSISDALLAAAAPAPPVEIQELRVSEVGDRVLVVSVTCSKRRDAMARVCRALEELRLRVITANITSVAGCPMHTLFVEVDHMDSVQMKQMVEAALSQLVATGSPLSSMSY

SEQ ID NO: 557 - DNA, 804 bp, Populus balsamifera subsp. trichocarpa
  misc_feature (1)..(804): Ceres GDNA ANNOT ID no. 1479796
atggaaccttgttcttggaactcaacaagggtgcaagcctctgattttgaaggaatgagtgatgggtttttggtgaatactggtttacaagccaaaacaagaactgggccatcttcaacttcctctttggttttggataatgaaaggggagagcttgtggaggctactgtgagaatggagaggaaaggggtggcggctgagagaagcattgccgctttaaagaatcatagtgaagctgagaagaagcgtagagcgaggattaatgcacatcttgacacacttaggagcctagtacctggtactaggaagatggacaaggcatcgttgcttgctgaagttatagctcacctaaaggagctgaagaggcaggcaacagaagctagtgaaggtcttctcatgccattggatattgatgaagtgagagttgaacagcaagaggatggtttgctcagtgccccttatgtaatcagggcatctatatgttgtgattgcaagcctggaattctgtctgatttaagacaagcacttgatgctctccatctaataataatgaaggcagagattgcgactttggaaggcaggatgaagaatgtttttgtgatgagcagctgcaaagaaggggatagtggtgatgctaaagtacaccagtttcttgctggctccatccaccaggcatttagatccatactagacaaattttctgcctcacaagaattcttattaaaatccacactttcgaacaagaggagaagggttgactcattcaaaccgtccttgtcatcttcttcaggagatctctggtga

SEQ ID NO: 558 - protein, 267 aa, Populus balsamifera subsp. trichocarpa
  misc_feature (1)..(267): Ceres GDNA ANNOT ID no. 1479796
  misc_feature (1)..(267)
  Functional Homolog of CDNA ID no. 13593033at SEQ ID no. 549with e-value of 1.2E-32 and percent identity of 42.63
MEPCSWNSTRVQASDFEGMSDGFLVNTGLQAKTRTGPSSTSSLVLDNERGELVEATVRMERKGVAAERSIAALKNHSEAEKKRRARINAHLDTLRSLVPGTRKMDKASLLAEVIAHLKELKRQATEASEGLLMPLDIDEVRVEQQEDGLLSAPYVIRASICCDCKPGILSDLRQALDALHLIIMKAEIATLEGRMKNVFVMSSCKEGDSGDAKVHQFLAGSIHQAFRSILDKFSASQEFLLKSTLSNKRRRVDSFKPSLSSSSGDLW

SEQ ID NO: 559 - DNA, 1494 bp, Arabidopsis thaliana
  misc_feature (1)..(1494): Ceres CDNA ID no. 13610698
  misc_feature (1)..(1494): Also Known As  Ceres SEEDLINE ME09891
tctccgatttcctctcatggcggcggaatcaaccagaaactcttctccgccgtctacttctcagtcttcaagccctataatcaatttacccgatgaccatctcttaaccatcttgcttcttcttcccgtagattcaatcctctccttctcaatgacctgcaagcgatacaagtctctagcttgctccgacagtctctgggaagctctgtgtgaacgagaatggggaccaacatctgtagatgctttaaagttgtcatctttacgagatgggttttcatggatgttgatgtttcagcgagtttataagatggattctgtttgctgtcacaagatctcagacccagatgatgatgatgaagaatcttcttcgtttccgatccctagagcttctcattctctcaacttcgttaatgatcatcttgttctctttggtggtggttgtcaaggaggacgccatcttgatgatacatggacatcatatgttgataagagcaatcaaagcatattgaaatggaagaaagttaaatcagggactccaagtgggagattcggacacacctgcatcgttataggcgagtatctactcttatttggaggtataaatgaccgtggagagaggctaaatgacacatggattggtcaagtcttttgccacgagggactctcttggaaactcctcaatgttgggtctttgcagcggcctcgtcctcctcctcgtggtgctcattccgcctgttgtattgctgagaagaagatggttgtacatggaggaatcgggctgaatggagtcaggcttggagatacatggattcttgaactttctgaagatttcagctctgggacatggcacatggtggagtctccacaattaccgccaccgcgctcagggcatactttgacctgcattagagaaaaccaagtggttctatttggaggcagaggattaggatatgatgtgcttgatgatgtttggatcttggatattcaagaaccgtgtgaagaaaaatggatacagatattctacgatttccaggatgttcccgaatacgcatcgttgcctcgggttggtcactcggcgactcttgtattgggaggtcgaatcttgatttatggcggtgaagattcttataggcataggaaagatgatttctgggtgttggatgttaaaaccattccttcatcaggtttgaaaccacaagggcttagcttaaacggatcatcagtgtggaaaaagcttgatcgaatctcatatggaccaaaaagtcggtcttttcaccgtgcctgcgctgattgttcagggagatttttatatgtgtttggcggaatggttgatggtcttcttcagcctgcagcatcgtctggtctaaggtttgatggagagcttttcatggtggagcttgttcttggcttctctgacctagaccatcaacaaagacccggaaaaagcatgtaatagtggtggttccttcttttgtaaattagcagattttgttt

SEQ ID NO: 560 - protein, 478 aa, Arabidopsis thaliana
  misc_feature (1)..(478): Ceres CDNA ID no. 13610698
  misc_feature (1)..(478): Also Known As  Ceres SEEDLINE ME09891
  misc_feature (176)..(207): Pfam Name: Kelch_1 Pfam Description: Kelch motif
  misc_feature (21)..(66): Pfam Name: F-box Pfam Description: F-box domain
  misc_feature (348)..(385): Pfam Name: Kelch_2 Pfam Description: Kelch motif
  misc_feature: Phenotype: Cup-shaped Useful for making plants with altered leaf shape e.g., curled leaves
MAAESTRNSSPPSTSQSSSPIINLPDDHLLTILLLLPVDSILSFSMTCKRYKSLACSDSLWEALCEREWGPTSVDALKLSSLRDGFSWMLMFQRVYKMDSVCCHKISDPDDDDEESSSFPIPRASHSLNFVNDHLVLFGGGCQGGRHLDDTWTSYVDKSNQSILKWKKVKSGTPSGRFGHTCIVIGEYLLLFGGINDRGERLNDTWIGQVFCHEGLSWKLLNVGSLQRPRPPPRGAHSACCIAEKKMVVHGGIGLNGVRLGDTWILELSEDFSSGTWHMVESPQLPPPRSGHTLTCIRENQVVLFGGRGLGYDVLDDVWILDIQEPCEEKWIQIFYDFQDVPEYASLPRVGHSATLVLGGRILIYGGEDSYRHRKDDFWVLDVKTIPSSGLKPQGLSLNGSSVWKKLDRISYGPKSRSFHRACADCSGRFLYVFGGMVDGLLQPAASSGLRFDGELFMVELVLGFSDLDHQQRPGKSM

SEQ ID NO: 561 - DNA, 1413 bp, Populus balsamifera subsp. trichocarpa
  misc_feature (1)..(1413): Ceres GDNA ANNOT ID no. 1510814
atggcaaagagtactcctagaagcagcaacattggatcatcatcagcatcaccgatagttaagctggctgatgaccatctcttcacaattatgcttctgcttcctgtagattcacttatctcctttgccatgacttgcaaaaggttcaggtccttaacaacttctgatacactgtgggagtccatatgcaggagggagtgggggtccacatcagtggatgccttcaagtcttctatcaataccaacaacaatcagcagttgccatggatgaggctatacaagcaggtgtctcagcttgactcattttcttgccataaactgcctgacccagatagtgacttgatgctcccaactcccagggcttctcactctctcaactttgtatctgattgcctggtcttgtttggtggtggccgtgaaggagggcgagatctcgatgatacatgggtggcatacataggtaaagattttcaaagaatgctaaaatggcagaaggttacctcaggaattccgagtgggagatttgggcatacttgcgccgtcattggcgaaaatcttgtgctttttggaggaattaatgatcgtgggatgcgtcaaaatgatacatgggtggggcaagtagtacttggtgagaaccttggtataacaacattgtcatggaggctgcttgatgtgagctccgtagcaccaccaccccgtggggctcatgctgcttgttgcattgataaaaggacaatggtcatccatggaggcattggattgtacggccttagattgggagatacttggattctagaactttcagagaatttctgttctggaacgtggatagagctggtggctcatccatcacctccacctcgttcaggacacacattgacatgtatcgaaggaacaggaactgttctatttggaggaagaggtttggggtatgatgtgctgcatgatgtctggctcttgcaagcgtctgaggatcaactcaagtgggtacagatgctctataatttgcaagacatacctgaaggagtctccctcccgcgagttggccactcagccacactaattttgggaggtcggctgctaatctatggaggtgaagattcacagagacacaggaagggagatttttgggtgttagatgttagtaagatcccatcaattaaagagcagtcaactccattaaattcaaggggattacaagcaaatatgtggagaaggctcaaggcaaagggttataaacccaactgcagatcattccatcgagcctgtgcagatcattcagggcgtcgcttgtacgtttttggtggaatggtggatagcttacttcaccctgccgaagcatctgagttgaggtttgatggggagctctttctggtaaaatttgagctggaaacaggagcagtaaggtgctga

SEQ ID NO: 562 - protein, 440 aa, Populus balsamifera subsp. trichocarpa
  misc_feature (1)..(440): Ceres GDNA ANNOT ID no. 1510814
  misc_feature (1)..(440)
  Functional Homolog of CDNA ID no. 13610698at SEQ ID no. 560with e-value of 3E-146 and percent identity of 66.43
MLLLPVDSLISFAMTCKRFRSLTTSDTLWESICRREWGSTSVDAFKSSINTNNNQQLPWMRLYKQVSQLDSFSCHKLPDPDSDLMLPTPRASHSLNFVSDCLVLFGGGREGGRDLDDTWVAYIGKDFQRMLKWQKVTSGIPSGRFGHTCAVIGENLVLFGGINDRGMRQNDTWVGQVVLGENLGITTLSWRLLDVSSVAPPPRGAHAACCIDKRTMVIHGGIGLYGLRLGDTWILELSENFCSGTWIELVAHPSPPPRSGHTLTCIEGTGTVLFGGRGLGYDVLHDVWLLQASEDQLKWVQMLYNLQDIPEGVSLPRVGHSATLILGGRLLIYGGEDSQRHRKGDFWVLDVSKIPSIKEQSTPLNSRGLQANMWRRLKAKGYKPNCRSFHRACADHSGRRLYVFGGMVDSLLHPAEASELRFDGELFLVKFELETGAVRC

SEQ ID NO: 563 - DNA, 1551 bp, Populus balsamifera subsp. trichocarpa
  misc_feature (1)..(1551): Ceres GDNA ANNOT ID no. 1457602
atggctactttcttcatggcaaagagtactcctagaagcagcaacattggatcatcatcagcatcaccgatagttaagctggctgatgaccatctcttcacaattatgcttctgcttcctgtagattcacttatctcctttgccatgacttgcaaaaggttcaggtccttaacaacttctgatacactgtgggagtccatatgcaggagggagtgggggtccacatcagtggatgccttcaagtcttctatcaataccaacaacaatcagcagttgccatggatgaggctatacaagcaggtgtctcagcttgactcattttcttgccataaactgcctgacccagatagtgacttgatgctcccaactcccagggcttctcactctctcaactttgtatctgattgcctggtcttgtttggtggtggccgtgaaggagggtttcattgcttgagaattttcttgcttcttgatcatggcttcaatatattgctatctgcaaatgcagtagtcccacttcttataatgcttcttgagtgcccattttggcaaccagattactggcgagatctcgatgatacatgggtggcatacataggtaaagattttcaaagaatgctaaaatggcagaaggttacctcaggaattccgagtgggagatttgggcatacttgcgccgtcattggcgaaaatcttgtgctttttggaggaattaatgatcgtgggatgcgtcaaaatgatacatgggtggggcaagtagtacttggtgagaaccttggtataacaacattgtcatggaggctgcttgatgtgagctccgtagcaccaccaccccgtggggctcatgctgcttgttgcattgataaaaggacaatggtcatccatggaggcattggattgtacggccttagattgggagatacttggattctagaactttcagagaatttctgttctggaacgtggatagagctggtggctcatccatcacctccacctcgttcaggacacacattgacatgtatcgaaggaacaggaactgttctatttggaggaagaggtttggggtatgatgtgctgcatgatgtctggctcttgcaagcgtctgaggatcaactcaagtgggtacagatgctctataatttgcaagacatacctgaaggagtctccctcccgcgagttggccactcagccacactaattttgggaggtcggctgctaatctatggaggtgaagattcacagagacacaggaagggagatttttgggtgttagatgttagtaagatcccatcaattaaagagcagtcaactccattaaattcaaggggattacaagcaaatatgtggagaaggctcaaggcaaagggttataaacccaactgcagatcattccatcgagcctgtgcagatcattcagggcgtcgcttgtacgtttttggtggaatggtggatagcttacttcaccctgccgaagcatctgagttgaggtttgatggggagctctttctggtaaaatttgagctggaaacaggagcagtaaggtgctga

SEQ ID NO: 564 - protein, 516 aa, Populus balsamifera subsp. trichocarpa
  misc_feature (1)..(516): Ceres GDNA ANNOT ID no. 1457602
  misc_feature (1)..(516)
  Functional Homolog of CDNA ID no. 13610698at SEQ ID no. 560with e-value of 2.5E-144 and percent identity of 65.92
MATFFMAKSTPRSSNIGSSSASPIVKLADDHLFTIMLLLPVDSLISFAMTCKRFRSLTTSDTLWESICRREWGSTSVDAFKSSINTNNNQQLPWMRLYKQVSQLDSFSCHKLPDPDSDLMLPTPRASHSLNFVSDCLVLFGGGREGGFHCLRIFLLLDHGFNILLSANAVVPLLIMLLECPFWQPDYWRDLDDTWVAYIGKDFQRMLKWQKVTSGIPSGRFGHTCAVIGENLVLFGGINDRGMRQNDTWVGQVVLGENLGITTLSWRLLDVSSVAPPPRGAHAACCIDKRTMVIHGGIGLYGLRLGDTWILELSENFCSGTWIELVAHPSPPPRSGHTLTCIEGTGTVLFGGRGLGYDVLHDVWLLQASEDQLKWVQMLYNLQDIPEGVSLPRVGHSATLILGGRLLIYGGEDSQRHRKGDFWVLDVSKIPSIKEQSTPLNSRGLQANMWRRLKAKGYKPNCRSFHRACADHSGRRLYVFGGMVDSLLHPAEASELRFDGELFLVKFELETGAVRC

SEQ ID NO: 565 - DNA, 1503 bp, Populus balsamifera subsp. trichocarpa
  misc_feature (1)..(1503): Ceres GDNA ANNOT ID no. 1465272
atgactactttcttcatggctgagacaagcactagtactacaagcagcaacattggatcgtcgtcgccaattgttaagctagctcaagaccatctcttcacaatcttgcttctgcttcctatagattcactcatctcctttgccaggacttgcaaaaggttcaggtccttaacaagttctgatacactgtgggagtccatatgcaggagggagtgggggtccacatcagtggatgccctcaagtcttctatcaataccaaaaacaatcagcagttgccatggatgaggctatacaagcaggtgtctcagcttgactcagtttcctgccataaactgtccgacccagatagtgaattgatgctcccaactcccagggcttctcactgtcttaactttgtatctgattgcctggtcttgtttggtggtggctgtgaaggagggcgagatctcgatgatacatgggtggcatacataggtaatgattttcaaaggatgctgaagtggcagaaagttaattcaggaattccaaacgggagatttgggcatgcatgcatcgtcattggcgattatctggtgctctttggaggaattaatgatcgtgggattcgtcaaaatgatacatgggtggggaaagtagtgctcagtgagaaccttggtataacattgtcatggaggctgcttgatgtgagatccatagcaccacctccccgtggggctcatgctgcttgctgcattgataaaagtacaatggtcatccatggagggattggattgtacggccttagaatgggagacacttggattctagaactttcagaaaatttctgttctggaacatggagggagctggtgactcatccatcacctccagctcgttcaggacacacattaacatgcatcgaaggaacaggaattgttctatttggaggaagaggttcaggttatgatgtgctgcatgatgtctggctcttgcaggtgtctgaggttgaactcaagtggatacagattctctataatttgcaagacatacctgcaggagtctccctcccacgagtcggccactcagccacactgattttgggaggtcggctgctaatctatggaggtgaagattcacagcggcacaggaaggacgatttttgggtattggatgttagtaagatcccatcaaataaagcgcagtctccattaaactcaaggggattgcaggcaaataatatgtggaaaatgctcaaggcaaagggttataaaccctaccgcagatcattccaccgagcctgtgcggatcattcagggtgtcgcttgtacgtttttggtggaatggtggatggcttacttcagcctgccgaagcatatgggttgaggtttgatggggagctctttctggtcaaattggagctggaaacagatatagtaaggccataccatctggcggctgaaaagagcctctttaagtttcttcagaaagaaatcccatgttctgttgacaaactagagctgtaa

SEQ ID NO: 566 - protein, 500 aa, Populus balsamifera subsp. trichocarpa
  misc_feature (1)..(500): Ceres GDNA ANNOT ID no. 1465272
  misc_feature (1)..(500)
  Functional Homolog of CDNA ID no. 13610698at SEQ ID no. 560with e-value of 1.7E-154 and percent identity of 65.63
MTTFFMAETSTSTTSSNIGSSSPIVKLAQDHLFTILLLLPIDSLISFARTCKRFRSLTSSDTLWESICRREWGSTSVDALKSSINTKNNQQLPWMRLYKQVSQLDSVSCHKLSDPDSELMLPTPRASHCLNFVSDCLVLFGGGCEGGRDLDDTWVAYIGNDFQRMLKWQKVNSGIPNGRFGHACIVIGDYLVLFGGINDRGIRQNDTWVGKVVLSENLGITLSWRLLDVRSIAPPPRGAHAACCIDKSTMVIHGGIGLYGLRMGDTWILELSENFCSGTWRELVTHPSPPARSGHTLTCIEGTGIVLFGGRGSGYDVLHDVWLLQVSEVELKWIQILYNLQDIPAGVSLPRVGHSATLILGGRLLIYGGEDSQRHRKDDFWVLDVSKIPSNKAQSPLNSRGLQANNMWKMLKAKGYKPYRRSFHRACADHSGCRLYVFGGMVDGLLQPAEAYGLRFDGELFLVKLELETDIVRPYHLAAEKSLFKFLQKEIPCSVDKLEL

SEQ ID NO: 567 - protein, 448 aa, Oryza sativa subsp. japonica
  misc_feature (1)..(448): Public GI no. 50942577
  misc_feature (1)..(448)
  Functional Homolog of CDNA ID no. 13610698at SEQ ID no. 560with e-value of 2.1E-118 and percent identity of 52.86
MEEEAAVARLGCDQVLSILHLLPAESVLSFAAACRAFHAWASSDALWEALCRRDWGARATAALAERRRRGGGGVPWRRIYAEVALLGALSARRVPVKGASPRPRASHSLNLVAGWLVLFGGGCEGGRHLDDTWVAYVGNGAGNRSSAVFSWQQLDSGTPSGRFGHSCSIVGDALVLFGGINDQGQRLNDTWIGQIICEESRRMKISWRLLEVGPHAPYPRGAHAACCVDDKFIVIHGGIGQSGSRLGDTWLLDLSNGLRSGIWHQIEDTEPLPLSRSGHTLTWIGGSRMVLFGGRGSEFDVLNDVWLLDINERYPKWKELKYDLSSVLGEMPFPRVGHSATLVLGGKILVYGGEDSQRRRKDDFWTLDLPALLQFESGSKKMTKRMWKKLRIDGQCPNYRSFHGACVDTSGCHVYIFGGMVDGLVHPAEASGLRFDGQLYQVDLVLHL

SEQ ID NO: 568 - DNA, 843 bp, Arabidopsis thaliana
  misc_feature (1)..(843): Ceres CDNA ID no. 23505182
  misc_feature (1)..(843): Also Known As  Ceres SEEDLINE ME10335
atggagaagaagaaagcaatgcaaattgaaggttacccgatcgagggattgtcgattggtgggcacgagacgtgcatcatatttccatctcttcggatagctttcgacattggtcgttgcccacatcgcgcaatttctcaagacttcctcttcatctctcactctcacatggatcatatcggtggattaccaatgtatgttgctactagaggcttgtacaaaatgaagcctccaacgattatagtacccgcatccattaaagaaactgttgagagtttattcgaagttcacagaaagttagattcttcagagctaaagcacaatcttgttggcttggacataggggaggagtttattataaggaaagatctcaaagtcaaagcctttaagacattccatgtcatccaaagccagggttatgtagtgtattcaactaaatataaactcaagaaggaatatattggcctatctggaaatgaaattaagaacttgaaggtttcaggtgttgagattacagacagcataataactcctgaagttgcttttacgggagatacaacgtcggattttgtagttgatgaaactaatgctgatgctctcaaggcaaaggttctcgtcatggagagcacatttcttgatgattcggtatcggtagagcatgcgagagattatggacatatccatatatctgagatagtaaatcatgctgaaaagtttgaaaacaaagcaatcctgctaatccacttttcggctcggtatacagtgaaggaaatcgaagatgcggtttctgcattgcctccacctttagagggacgtgtgtttgcactaacacaaggattctaa

SEQ ID NO: 569 - protein, 280 aa, Arabidopsis thaliana
  misc_feature (1)..(280): Ceres CDNA ID no. 23505182
  misc_feature (1)..(280): Also Known As  Ceres SEEDLINE ME10335
  misc_feature (48)..(280): Pfam Name: Lactamase_B Pfam Description: Metallo-beta-lactamase superfamily
  misc_feature: Phenotype: Early Senescence Useful for accelerating crop development and harvest
  misc_feature: Phenotype: Short Useful for making shorter plants
  misc_feature: Phenotype: Weak Useful for making stronger plants
  misc_feature: Phenotype: Reduced fertility Useful for sterility, genetic confinement systems
MEKKKAMQIEGYPIEGLSIGGHETCIIFPSLRIAFDIGRCPHRAISQDFLFISHSHMDHIGGLPMYVATRGLYKMKPPTIIVPASIKETVESLFEVHRKLDSSELKHNLVGLDIGEEFIIRKDLKVKAFKTFHVIQSQGYVVYSTKYKLKKEYIGLSGNEIKNLKVSGVEITDSIITPEVAFTGDTTSDFVVDETNADALKAKVLVMESTFLDDSVSVEHARDYGHIHISEIVNHAEKFENKAILLIHFSARYTVKEIEDAVSALPPPLEGRVFALTQGF

SEQ ID NO: 570 - protein, 302 aa, Oryza sativa subsp. japonica
  misc_feature (1)..(302): Public GI no. 50906279
  misc_feature (1)..(302)
  Functional Homolog of CDNA ID no. 23505182at SEQ ID no. 569with e-value of 8.6E-103 and percent identity of 65.83
MANSGKSSPAATSTTAPPPGRPKAKAPPLTVEGYPVEGISIGGQETCVIFPTLSAAFDIGRCPQRAVSQEFLFISHAHLDHIGGLPMYVATRGLYRQRPPTIFIPACLRDPVERLFELHRSMDQSELSHNLVPLEIGQEHELRRDLKVKAFKTYHAIPSQGYVIYTVKQKLKPEYLGLPGSEIKQLKLSGVEITNTLTVPEIAFTGDTMADFILDPDNADVLKAKILVVESTFVDDSVTIEHAREYGHTHLFEILNQCDKLENKAILLIHFSARYTAEEIDIAINKLPPSFRSRVHALKEGF

SEQ ID NO: 571 - protein, 357 aa, Zea mays
  misc_feature (1)..(357): Ceres CLONE ID no. 498454
  misc_feature (1)..(357)
  Functional Homolog of CDNA ID no. 23505182at SEQ ID no. 569with e-value of 8.1E-91 and percent identity of 59.71
MATASLFSLPSLRVLSRTSAHGPRFQILAARKPVESSTATSGSRRGGSKGAGLLSVLDRAMADEEEYRRARAQVQRKGVEVEGYAIEGISVGGHETCITVPSLNVAFDIGRGPQFAVSQDYLFITHAHLDHIGGLPMYIATRGLYNLKPPTVFVPPCIRDDVEDLLQVHRRTSQIELKVELVALDLGETYEIRNDLVARPFQTYHTIPSQGYVIYSIRRKLKKQYAHLKGSQIMKLKQSGTEITDTILYPEVAFTGDTKSDFILDPRNADALRAKVLITEATFLDDHVDVEHAREHGHMHLSEIMEHFQWFRNETIVLTHFSNRYSLEDIRQAVSRLQPKLNSKVVALTEGFKSDYR

SEQ ID NO: 572 - protein, 354 aa, Glycine max
  misc_feature (1)..(354): Ceres CLONE ID no. 565294
  misc_feature (1)..(354)
  Functional Homolog of CDNA ID no. 23505182at SEQ ID no. 569with e-value of 9.6E-88 and percent identity of 58.12
MQISLSNLAFKTPQLFPIQHPIFPPKAPLYHHQVSTQSHVNNVLKGSSGYLSEISKAIDHEEQYRLARSQVNRKVLDLEGYSIEGLSVGGQETCIIIPEFKCTFDIGRCPSRAIQQNFLFITHAHLDHIGGLPMYVTSRGLFNLKPPTVFVPPCIKEDVEKLLDIHRTMGQVELNAEVVALDVGETYEIRNNLVVRPFRTQHVIPSQGYVVYSIRKKLRKQYAHLNGKQIEKLKKSGIEITDMILSPEVAFTGDTTSDFMLDPCNADALRAKILITEATFLDDSFSIDHARQHGHTHLFEIIANAQWIRNKAVLLTHFSPRYTIEDIRQAASKLQSRLSAKVVPLTEGFKSMYS

SEQ ID NO: 573 - DNA, 882 bp, Arabidopsis thaliana
  misc_feature (1)..(882): Ceres CDNA ID no. 13645995
  misc_feature (1)..(882): Also Known As  Ceres SEEDLINE ME10363
  misc_feature (1)..(882): Also Known As  Ceres CLONE ID no. 158333
aagaaacttaatcacaactctctctttaatctctttgtctctctctctctctctctatctctctctcattttaatggcgacccaagattctcaagggattaaactctttggtaaaaccataacattcaacgccaacatcacacagacgataaaaaaagaagagcagcaacaacaacaacagccagagctacaagcaacaacagccgttagatcaccctcatcggatctgacggctgagaagcgtccagacaagatcataccatgtccgagatgcaagagcatggagactaagttttgttacttcaacaactacaacgttaatcaaccaagacacttctgcaaaggttgtcaacgttactggaccgccggtggagctctccggaatgttcccgtcggtgccggtcgtcggaagtcaaaacctcccggacgtgtcggtgggttcgctgagttgcttggagctgcgactggagctgttgatcaggtcgagctagatgctttgctagtggaagagtggagagctgctacggcgtctcacggtggtttccggcatgattttccggtgaagaggctccgttgttacaccgatggtcaatcttgttaattatttttacatttttatttgtttgttttcgggtttgggtttgggtggtttgctataatttaacccgtagaacgaaagaacgtggttaaatttgctttgctttgattactctggatacgtacaggctagcaacaaaatttaactagttaattactaattaattagtaggtttttaatacttgcttatctactaaacagctgtcgctttttaatctctcttgttgtaaattgaagctcgtggccgtgggatttttcttctctaaacaaagacggtgtggttg

SEQ ID NO: 574 - protein, 175 aa, Arabidopsis thaliana
  misc_feature (1)..(175): Ceres CDNA ID no. 13645995
  misc_feature (1)..(175): Also Known As  Ceres SEEDLINE ME10363
  misc_feature (1)..(175): Also Known As  Ceres CLONE ID no. 158333
  misc_feature (57)..(119): Pfam Name: zf-Dof Pfam Description: Dof domain, zinc finger
  misc_feature: Phenotype: Late Flowering Useful for delaying flowering time
  misc_feature: Phenotype: ROSETTE LEAVES Useful for making ornamental plants with modified leaves
  misc_feature: Phenotype: Long Petioles Useful for making plants that grow better in shade
MATQDSQGIKLFGKTITFNANITQTIKKEEQQQQQQPELQATTAVRSPSSDLTAEKRPDKIIPCPRCKSMETKFCYFNNYNVNQPRHFCKGCQRYWTAGGALRNVPVGAGRRKSKPPGRVGGFAELLGAATGAVDQVELDALLVEEWRAATASHGGFRHDFPVKRLRCYTDGQSC

SEQ ID NO: 575 - DNA, 1362 bp, Populus balsamifera subsp. trichocarpa
  misc_feature (1)..(1362): Ceres GDNA ANNOT ID no. 1503065
atgttggagccaaaagacccggctattaagctgtttgggaagactattcaagactcggtggaaaaaagcctgactgagaaacaggaagatggagtttcacccgtggctactgaagagccttcaaatccagatgcaacctcagggacaagtgaaaaccctaaaacaccttccattgagaaggagagtgaaggattgcaaacttcaaggacagaagaagaagatagtgatacaagtaattcgccagaaaagaccctgaaaaaacctgataagatccttccatgcccccgctgtaatagcatggacaccaagttctgttactacaacaattacaacgtgaaccaaccccgacacttctgcaagaattgtcagagatattggacagctgggggaaccatgaggaatgtgcctgtgggtgctggtcgtcgcaaaaacaagaactcagcttctcattatcgtcacataaccattcctgaagctcttcagaatgttcgagctgatgttccaaatggagtctaccatccttcaatgaaaactaatggaacagtgctaacctttggctctgacacacctcttcatgaatcaatggcttctgtattgaaccttgcagataaaacaacgcggaattgcacaagaaacgggtctcataaacctgatgcagtgaggattccagtttcttatggaagtggagaaaacggtgatgaccattctaatggatcttcagtcacagtgtcaaattcaattgatgaggcaggcaaaagcatgtcgaaagaatcagctatgcagaattgtcagggctttccccctgagataccatgttttcctggagttccctggccttacccttggaattcagctcaatggagctccccattacccccacctgccttttgccctcccggttttcctatgccattctatcctgcagcagcatactggggttgcaccgtaccaggtgcttggaatatcccttggcttcctcagccatcttctcccaagcaaacctcctcgagctctggcccaaactctccaaccctagggaaacattcaagggatgaaaacatgctcaaatctagcaactctgaagaaggggagtcggcaaaagaaaataacactgaaagatgcctttggatcccaaaaacgctcaggattgttgacccaggtgaagctgcaaaaagctctatatggacgactctggggattaagaatgataagcctgacttgattggtgggcgaggactgtttaaggcgtttgattcaaaggtcgaaaagaatcatgaagccgaaacctctccagtcttacaagctaatcctgcagcattgtctagatcactcaaatttcaggagagctcgtattttgggtag

SEQ ID NO: 576 - protein, 354 aa, Populus balsamifera subsp. trichocarpa
  misc_feature (1)..(354): Ceres GDNA ANNOT ID no. 1503065
  misc_feature (1)..(354)
  Functional Homolog of CDNA ID no. 13645995at SEQ ID no. 574with e-value of 8E-20 and percent identity of 86.96
MDTKFCYYNNYNVNQPRHFCKNCQRYWTAGGTMRNVPVGAGRRKNKNSASHYRHITIPEALQNVRADVPNGVYHPSMKTNGTVLTFGSDTPLHESMASVLNLADKTTRNCTRNGSHKPDAVRIPVSYGSGENGDDHSNGSSVTVSNSIDEAGKSMSKESAMQNCQGFPPEIPCFPGVPWPYPWNSAQWSSPLPPPAFCPPGFPMPFYPAAAYWGCTVPGAWNIPWLPQPSSPKQTSSSSGPNSPTLGKHSRDENMLKSSNSEEGESAKENNTERCLWIPKTLRIVDPGEAAKSSIWTTLGIKNDKPDLIGGRGLFKAFDSKVEKNHEAETSPVLQANPAALSRSLKFQESSYFG

SEQ ID NO: 577 - DNA, 1512 bp, Populus balsamifera subsp. trichocarpa
  misc_feature (1)..(1512): Ceres GDNA ANNOT ID no. 1450024
atgttggagccaaaagacccggctattaagctgtttgggaagactattcaagtgacagagatctcttctactaccactacagataatgatgatagtcaagatcaagaccgtccatcttgtgcaagctcttctctttatgacgccgattctgataataataagagatatcatggagaagaagatatagaagctgatgataaggactcggtggaaaaaagcctgactgagaaacaggaagatggagtttcacccgtggctactgaagagccttcaaatccagatgcaacctcagggacaagtgaaaaccctaaaacaccttccattgagaaggagagtgaaggattgcaaacttcaaggacagaagaagaagatagtgatacaagtaattcgccagaaaagaccctgaaaaaacctgataagatccttccatgcccccgctgtaatagcatggacaccaagttctgttactacaacaattacaacgtgaaccaaccccgacacttctgcaagaattgtcagagatattggacagctgggggaaccatgaggaatgtgcctgtgggtgctggtcgtcgcaaaaacaagaactcagcttctcattatcgtcacataaccattcctgaagctcttcagaatgttcgagctgatgttccaaatggagtctaccatccttcaatgaaaactaatggaacagtgctaacctttggctctgacacacctcttcatgaatcaatggcttctgtattgaaccttgcagataaaacaacgcggaattgcacaagaaacgggtctcataaacctgatgcagtgaggattccagtttcttatggaagtggagaaaacggtgatgaccattctaatggatcttcagtcacagtgtcaaattcaattgatgaggcaggcaaaagcatgtcgaaagaatcagctatgcagaattgtcagggctttccccctgagataccatgttttcctggagttccctggccttacccttggaattcagctcaatggagctccccattacccccacctgccttttgccctcccggttttcctatgccattctatcctgcagcagcatactggggttgcaccgtaccaggtgcttggaatatcccttggcttcctcagccatcttctcccaagcaaacctcctcgagctctggcccaaactctccaaccctagggaaacattcaagggatgaaaacatgctcaaatctagcaactctgaagaaggggagtcggcaaaagaaaataacactgaaagatgcctttggatcccaaaaacgctcaggattgttgacccaggtgaagctgcaaaaagctctatatggacgactctggggattaagaatgataagcctgacttgattggtgggcgaggactgtttaaggcgtttgattcaaaggtcgaaaagaatcatgaagccgaaacctctccagtcttacaagctaatcctgcagcattgtctagatcactcaaatttcaggagagctcgtattttgggtag

SEQ ID NO: 578 - protein, 354 aa, Populus balsamifera subsp. trichocarpa; identical to SEQ ID NO: 576
  misc_feature (1)..(354): Ceres GDNA ANNOT ID no. 1450024
  misc_feature (1)..(354)
  Functional Homolog of CDNA ID no. 13645995at SEQ ID no. 574with e-value of 8E-20 and percent identity of 86.96

SEQ ID NO: 579 - DNA, 1554 bp, Populus balsamifera subsp. trichocarpa
  misc_feature (1)..(1554): Ceres GDNA ANNOT ID no. 1458507
atgtcagatttggcgataaagctgtttggcaagacgattccactgcaagtcaatcagcaggaggatgtttcttgtgctgctaacaagtacgagtcctcctcaggaacgcctcccgagtccgaggactgttatgataatactgctactgcaacttcctcacaggaaaaccacaactctcataaggaacgaggagagcaagaagggaacaacaacagggggccacaagctctgtatcagtatttcactgttactttgcattttgaaacggagacttcaggagaggaaattgccaatgataaacaagaagatgttacctcgaatcagatcaacaaggactcaaaaggtccaacatcatcaggcattagtgagaacccaaagactccctcagctgagagggaaacttcatcactgaaaagcagcaagaatgaagaacaaagtgagacaagcatctcgcaagagaagactttgaagaagcctgacaaaatacttccatgccctcgatgtaatagcatggacactaaattctgttattacaacaattacaatgtcaatcagcctcgtcatttctgtaaaaactgtcagagatactggactgctggaggaaccatgaggaatgtgcctgtgggagctggaaggcgcaagaataagagctcttctgcttcacactatcgtcacttaatggtatcagaagctctccgaacagctcaagtccatgccatgaatggatttcataacccctctctgggaaacaacggcactgtccttacctttggttccgattctcctctttgtgaatctgttgcctctgtgttgaacctttcagagaaaacacaaaatagtgttcgaaacgggtatcatagacctgaacatagaatccttgtgtcttgtggagggacaggaggtgacggggatgatcactcaagtgtatcttccgccacggcttcaaattcatcagagaagggatgcaatggtacttcgcgagaagcggttaacaaggattatcaatcatttcctccccaggcaccctgcttcccggggcctccttggccatatccatggaactctgcgattactccacctacgttttgcccttcaggctttccagtatcgtttttccctgcaccagcttactggggttgtactgttccaagcccttggaatgtaccgccatgtgcatcctctccatcagccactctaaaccacagtacccaaagctccagtcctacttttccactggggaaacattcaagggatggcaacatccttaatccaccctgcttagaagagccctccagggacggcaccaaatcagaaacgggtgttttggttccaaagaccttgaggattgatgatcctagtgaagctgcaaagagctctatatgggcgaccctcgggatcacgaatgagaaatccagttctattaatggaggaggtctcttcaagggctttcagtcaaaaagcgaagacagaaattacatggcaggaacaacttcagtgttgcaagcgaaccctgctgcgttttcccggtctctcaatttccatgagaacacttga

SEQ ID NO: 580 - protein, 347 aa, Populus balsamifera subsp. trichocarpa
  misc_feature (1)..(347): Ceres GDNA ANNOT ID no. 1458507
  misc_feature (1)..(347)
  Functional Homolog of CDNA ID no. 13645995at SEQ ID no. 574with e-value of 8E-20 and percent identity of 86.96
MDTKFCYYNNYNVNQPRHFCKNCQRYWTAGGTMRNVPVGAGRRKNKSSSASHYRHLMVSEALRTAQVHAMNGFHNPSLGNNGTVLTFGSDSPLCESVASVLNLSEKTQNSVRNGYHRPEHRILVSCGGTGGDGDDHSSVSSATASNSSEKGCNGTSREAVNKDYQSFPPQAPCFPGPPWPYPWNSAITPPTFCPSGFPVSFFPAPAYWGCTVPSPWNVPPCASSPSATLNHSTQSSSPTFPLGKHSRDGNILNPPCLEEPSRDGTKSETGVLVPKTLRIDDPSEAAKSSIWATLGITNEKSSSINGGGLFKGFQSKSEDRNYMAGTTSVLQANPAAFSRSLNFHENT

SEQ ID NO: 581 - DNA, 1521 bp, Populus balsamifera subsp. trichocarpa
  misc_feature (1)..(1521): Ceres GDNA ANNOT ID no. 1476818
atgtcggagccaaaagaccaggcatttaagctgttcgggaagactattcaagtgccagagatctctgttactactgctaccaccacagatgatgatgatgacgacgatagtcaagatcaagaccgtccttcttgtgcaaactcttctcttgatgagaccaatattactgacgattataataacaatgataaaagagatcatggagaagaagatacagaaactgatgataaggattcggtgggtaaaacaacaattgagaaccaggaagatggagcttcacctgtagctgccaaagagtcttcaaatctagatgcaacttcagggacaagtgaaaaccctaaaacaccttccgttgagaaagagagcacggcgttgaaaacttcaaacactgaagaagaacagagtgatacaagtaattcacaagagaaaaccctgaagaaaccagacaagatcattccatgcccccgctgtaatagcatggacacaaagttttgttactacaacaattacaacgtgaaccaaccccgacacttctgcaagaattgtcagagatattggacagctggcggtaccatgaggaatgtgcctgtgggtgctggtcgtcgcaaaaacaagaactcagcttctcattaccgtcacataaccattcctgaagctcttcagaatggtcgagctgatgttccaaatggagtccaccatccttcactgaaaactaatggaacagtgctaacctttggttctgatgcacctcttcatgaatcaatggcttcggtattgaatcttgctgataaaacaatgcggaactgcacaatgaatgggtttcataaacctgaagcattaagggtcccagtttcttatggaggtggtgaaaacggtgatgaccattctaatggatcttctgtcactgtgtcaaattcaagcgatgaagctggcaaaagtgtgtcaaaagaatcagctatgcagaattatcagggctacccccctcagataccatgttttcctggagttccctggccttacccttggaattcagctcaatggagctccccagtacccccacctgccttttgcccttccagttttcctatgccattctatcctgcagcagcttattggggttgtactgtaccaggtgcttggaatgtcccttggcttcctcaaccatcttctccaaaacaaacctcctcgagctctgaccctaactctccaaccctagggaaacattcaagagatgaaaacttgctcaaacctagcaactccaaagaagagctggtgaacactgaaagatgcctttggattccgaaaacgctgaggattgatgacccaggagaagccgcaaaaagctctatatggacaacacttgggattaagaatgataagcctggctcatttggtggccgaggactctttaaggcctttgattcaaaggttgagaagaatcgcgcagccgaaacctctccagtcttgcacgctaatcctgcagcattgtctagatctctcaaatttcaggagagctcataa

SEQ ID NO: 582 - protein, 347 aa, Populus balsamifera subsp. trichocarpa
  misc_feature (1)..(347): Ceres GDNA ANNOT ID no. 1476818
  misc_feature (1)..(347)
  Functional Homolog of CDNA ID no. 13645995at SEQ ID no. 574with e-value of 8E-20 and percent identity of 86.96
MDTKFCYYNNYNVNQPRHFCKNCQRYWTAGGTMRNVPVGAGRRKNKNSASHYRHITIPEALQNGRADVPNGVHHPSLKTNGTVLTFGSDAPLHESMASVLNLADKTMRNCTMNGFHKPEALRVPVSYGGGENGDDHSNGSSVTVSNSSDEAGKSVSKESAMQNYQGYPPQIPCFPGVPWPYPWNSAQWSSPVPPPAFCPSSFPMPFYPAAAYWGCTVPGAWNVPWLPQPSSPKQTSSSSDPNSPTLGKHSRDENLLKPSNSKEELVNTERCLWIPKTLRIDDPGEAAKSSIWTTLGIKNDKPGSFGGRGLFKAFDSKVEKNRAAETSPVLHANPAALSRSLKFQESS

SEQ ID NO: 583 - protein, 490 aa, Oryza sativa subsp. japonica
  misc_feature (1)..(490): Public GI no. 56783710
  misc_feature (1)..(490)
  Functional Homolog of CDNA ID no. 13645995at SEQ ID no. 574with e-value of 1.2E-29 and percent identity of 85.00
MAALRQGDDPAIKLFGRTIPLLLDPPAAAAAAADEVMPNLGNGVKTNNDLPLVSDKLLIVKGIPFCPNNSKKNDLQGISRPDGRIEIDSMTEDVKTEPDGSVPEKILKKPDKILPCPRCNSMETKFCYFNNYNVHQPRHFCRNCQRYWTAGGAMRNVPVGAGRRRNKHVSKYCQAMMTCNNTVAPGDVSDVVHHQVITHGSSLLPATLKENETPTEFISEVPPCKSSASILDIGEPNDTDLVPLASGDNKEEKSCASSVVVSSCSENLMPDNAIMKEPNNRSGCCNGVALPFPTGPALVLPWSLGWNSVALMPATQCSMQPVLGLKDGIPCPPSWPPQLMVPAPGICTPVVPIPLVPPLWSCFPGWPNGMWNAQCPGGNTTVLPSTAPNKISCSGSSSLVLGKHSREESLQEEEKTRNYLWVPKTLRIDDPAEAAKSSIWATLGIKPDDKGIFKSFQPNVAKNGTAPESPQALQANPAAFSRSQSFQETT

SEQ ID NO: 584 - protein, 454 aa, Oryza sativa subsp. japonica
  misc_feature (1)..(454): Public GI no. 34903284
  misc_feature (1)..(454)
  Functional Homolog of CDNA ID no. 13645995at SEQ ID no. 574with e-value of 1.3E-27 and percent identity of 40.57
MPNLGNGVKTNNDLPLVSDKLLIVKGIPFCPNNSKKNDLQGISRPDGRIEIDSMTEDVKTEPDGSVPEKILKKPDKILPCPRCNSMETKFCYFNNYNVHQPRHFCRNCQRYWTAGGAMRNVPVGAGRRRNKHVSKYCQAMMTCNNTVAPGDVSDVVHHQVITHGSSLLPATLKENETPTEFISEVPPCKSSASILDIGEPNDTDLVPLASGDNKEEKSCASSVVVSSCSENLMPDNAIMKEPNNRSGCCNGVALPFPTGPALVLPWSLGWNSVALMPATQCSMQPVLGLKDGIPCPPSWPPQLMVPAPGICTPVVPIPLVPPLWSCFPGWPNGMWNAQCPGGNTTVLPSTAPNKISCSGSSSLVLGKHSREESLQEEEKTRNYLWVPKTLRIDDPAEAAKSSIWATLGIKPDDKGIFKSFQPNVAKNGTAPESPQALQANPAAFSRSQSFQETT

SEQ ID NO: 585 - protein, 380 aa, Cucurbita maxima
  misc_feature (1)..(380): Public GI no. 1669341
  misc_feature (1)..(380)
  Functional Homolog of CDNA ID no. 13645995at SEQ ID no. 574with e-value of 3.1E-27 and percent identity of 85.00
MNPEVLSTDENDKLATRKTEKEQNDAPNSKEKLKKPDKILPCPRCNSMETKFCYYNNYNVNQPRHFCKACQRYWTEGGTIRNVPVGAGRRKNKNSASHYRHITISEALRAAQIDVPIEVNHLASKGNGRVLNFSVSPPVCESMVNVSHPAERKVLNGTRNEFEGAKGPCEGGETGDDCSSASSVTMSSSMKNGARRFPQEPHMQNINGFPSQIPCLPGVPWPCSWTAPIPPPALCPPGVPLSFYPATYWSCSASGSWNIPWVTPQPCPPIPGPNSPTLGKHSRDGDELQADNSEMKDPPKQKNGSVLVPKTLRIDDPNEAAKSSIWETLGIKNDSIKAVDLSNVFQSKGDLKSNVSEVLSPVLQANPAALSRSLTFHERS

SEQ ID NO: 586 - DNA, 1659 bp, Populus balsamifera subsp. trichocarpa
  misc_feature (1)..(1659): Ceres GDNA ANNOT ID no. 1479325
atgaagggtgagtccaaagatccagctttcaagctctttggtagaaagattccggtgcctgacactcagtttccggccgaaccactagccaagaaatattgttcttgggatatcgtgttcgaaacgcaggttctgtttcctctgttgttcaaacgtgaaacttcctttcctctggggctaaaaacgaaaaattcatcatacttctcctgttgcatcaaaagtgatttaatcatggcaatcatactcccaactgctccattattttttcttggcagctgcagtgacataacaaaattagaaactaagggtcctagtgaagaaaactcagaagaacctgaaatgttctctgctttaggacaaggtgaggaagagatccaagctgcaatgcaagtgaatgagacagaagtaattgctaagcctaaggaaggtcagctggagactaatggcacagacaaagagagagtcttcaagaagccagataaaattctaccgtgtccacgatgcaactgtttagacacaaaattctgttacttcaataactacaatgtcaaccaaccgaggcatttctgcaagaattgccaaagatattggacagctggtggaacaatgagaaatgttcctattggtgctggccgacggaagaataagcacttagctactcaatatcgtcagatattagtatcttctgatggaatgcctattgccaggatggaaaactcagactcagccggtcaccaactttcatcatctgttgaatctgcgaccactttgagtccctcaacagcaaatgggacggttctaaaatttggtcctgaagcacctctttgtgattccatggagaccgtgcttaatcttggagacccaaaaagatatgttgagatgagttcagtcaattatcaagataatggagaggagccgccctcatgtggatcatccaaggcatctttcattgtttgtgaaaatgaattgcctgaaaatattatgcaggagcaagttgatatgccagcatcttctaacaacctcagcgctccacattctctgctttgttattctgttccttcatgggtttttccttggaatccagcttggaataacgaaacttccatggctgcagctcagtactcctctggccaggcttgcataacaaatgttcccactcaagttcaattgtgccccacaccaatgttggcagttcccagcatttgtccgcccaacattcctttgcaatttgtacctgcttcttattggggttgcatgcccacatggactgctggaactggaaatgtaccactgtgtggatcgaatggctgccttactccatcatcctctaccaccaccagttattgctcgggaaatggctcaccaaaattaggcaagcattctagagattcaaaatttatggatgaagaaaagacagaaaaatgtatattggttccgaaaactctgagaattgatgacccaagcgaggcttcaaagagtcctctatgggctacatttggtctcccgcctgcccagaaggatcccacatcaaaaggtactatattcaagaattttgaaaccaaagcagaaggctgtggtcatgtatctgatgccactaatgtactggaagcaaacccggcagctctttctcgctctcaaaccttccaggagagtggctaa

SEQ ID NO: 587 - protein, 475 aa, Populus balsamifera subsp. trichocarpa
  misc_feature (1)..(475): Ceres GDNA ANNOT ID no. 1479325
  misc_feature (1)..(475)
  Functional Homolog of CDNA ID no. 13645995at SEQ ID no. 574with e-value of 1.3E-26 and percent identity of 81.67
MAIILPTAPLFFLGSCSDITKLETKGPSEENSEEPEMFSALGQGEEEIQAAMQVNETEVIAKPKEGQLETNGTDKERVFKKPDKILPCPRCNCLDTKFCYFNNYNVNQPRHFCKNCQRYWTAGGTMRNVPIGAGRRKNKHLATQYRQILVSSDGMPIARMENSDSAGHQLSSSVESATTLSPSTANGTVLKFGPEAPLCDSMETVLNLGDPKRYVEMSSVNYQDNGEEPPSCGSSKASFIVCENELPENIMQEQVDMPASSNNLSAPHSLLCYSVPSWVFPWNPAWNNETSMAAAQYSSGQACITNVPTQVQLCPTPMLAVPSICPPNIPLQFVPASYWGCMPTWTAGTGNVPLCGSNGCLTPSSSTTTSYCSGNGSPKLGKHSRDSKFMDEEKTEKCILVPKTLRIDDPSEASKSPLWATFGLPPAQKDPTSKGTIFKNFETKAEGCGHVSDATNVLEANPAALSRSQTFQESG

SEQ ID NO: 588 - DNA, 2124 bp, Arabidopsis thaliana
  misc_feature (1)..(2124): Ceres CDNA ID no. 13592165
  misc_feature (1)..(2124): Also Known As  Ceres SEEDLINE ME10482
  misc_feature (1)..(2124): Also Known As  Ceres CLONE ID no. 1150844
gacgacaagagacgacctttgagactcgagaagctctctccaaaaacaaacgaaaagaagcgacttttgcctcttttggtctctccccttctccggagagatctgctctctctatctatctctcaatctgtaagaagaagattcccacttcagtaaaagccctaactttacttgggaaagttcttcatctatcatccttcaatcgtcatcatccatggctgatcaacaaaccctagattcctctactcctcctcctactcaatccgatgatctatctcactcccactctacttcctctactacttcagcttcttcttcctcagatccatcactcttgaggtctctctccttaagtcgactcaacgccggagctcctgagttcgttcctggtcgaactactcctccgctgcctcaacctccgaggatgattatcccgcctcctccgccgcacggtatgcttcatatgtatcaccaccagcctcctttcaatactccagttcttggtcctgttccaatccagccacacttggttcctgttcaaaatcaccaccctcatcatcgctttcatcagcatcatcatcacaatcgtcatcagaatcagcaatatgtcccggtgaggaatcacggagagtatcagcagcgtggtggtgtcggtggtgagcaggaaccggatttggtttcaaagaagaatgatcggagagatcatagtaagagagaatctaagaacgatcaagtgactgaaactggagcttctgtttctattgattcaaaaactggtttgcctgaagattctatccagaagattgtgaatcaggttgaatactatttcagtgacttgaacttggctactacagatcatctcatgagattcatttgcaaggatcctgaaggatatgtgcctattcatgttgttgcgtcgttcaagaaaattaaagctgtcattaacaataattctcagcttgccgcagtgctacagaactcagctaagctttttgttagtgaagatggaaagaaagtgagacgcataagtccgattactgagtcggctatagaagagcttcagtctcgcattattgttgctgagaatctccctgaggatcattgctaccaaaacctgatgaagattttttcaactgttggaagtgtgaagaacatccgtacctgccagcctcaaaataatggaagcggtgctccacccgcagcgagatcagcagctaaaagcgatggtacgcttttcagtaacaaggtccatgcttttgttgagtatgagattgttgagctagccgagagagcagttaccgagttaagtgaagcgggaaattggaggagcggtcttaaagtccggttgatgctaaagcatcagacgaaggaaccaaaacaaggtcaagggcgaggaagaaaaggacatgatgcagatgtagaacatgaggaagatgatgctacaacatccgagcagcagccgattgagaaacaatctgatgactgttctggggaatgggatacacatatgcaagagcagccaataggagaggatcaagggaatgagaaagcggctgggcagagaaaagggcgtaacagaggtagaggaaagggacgaggacgagggcaaccacaccagaaccaaaaccagaacaacaaccacagccataaccaaaaccacaaccacaatgggcgaggaaatcatcatcatcatcatcatcatcaagtgggaacacaaccttcgaacaatccaatgaacaacatggagcaaccaggcatggggaaacagcaaccacctggaccacgaatgcctgatgggaccagaggattctcaatgggacggggaaagccggttatggttcaggcagagtgatccagagctgttttgaaaaggaggtgatgtggaattgtgaatggtcaaaaagggagataaatagagagagagcaagagagaaagagagagatttatccttcccatggggattggctagttttgcagactttatatttgtcttacttacttcgaaatacttttcaattacgcttctcttacaaggaaacaacaaaaaaactacattttcctcatatagtgtacgtgtaatgaaacagcaatttcagttaatattttgtcctaaaagcttttct

SEQ ID NO: 589 - protein, 545 aa, Arabidopsis thaliana
  misc_feature (1)..(545): Ceres CDNA ID no. 13592165
  misc_feature (1)..(545): Also Known As  Ceres SEEDLINE ME10482
  misc_feature (1)..(545): Also Known As  Ceres CLONE ID no. 1150844
  misc_feature (197)..(256): Pfam Name: La Pfam Description: La domain
  misc_feature: Phenotype: Oval Shaped Useful for making plants with increased biomass and foliage
  misc_feature: Phenotype: Short Petioles Useful for making smaller plants
  misc_feature: Phenotype: Reduced fertility Useful for sterility, genetic confinement systems
MADQQTLDSSTPPPTQSDDLSHSHSTSSTTSASSSSDPSLLRSLSLSRLNAGAPEFVPGRTTPPLPQPPRMIIPPPPPHGMLHMYHHQPPFNTPVLGPVPIQPHLVPVQNHHPHHRFHQHHHHNRHQNQQYVPVRNHGEYQQRGGVGGEQEPDLVSKKNDRRDHSKRESKNDQVTETGASVSIDSKTGLPEDSIQKIVNQVEYYFSDLNLATTDHLMRFICKDPEGYVPIHVVASFKKIKAVINNNSQLAAVLQNSAKLFVSEDGKKVRRISPITESAIEELQSRIIVAENLPEDHCYQNLMKIFSTVGSVKNIRTCQPQNNGSGAPPAARSAAKSDGTLFSNKVHAFVEYEIVELAERAVTELSEAGNWRSGLKVRLMLKHQTKEPKQGQGRGRKGHDADVEHEEDDATTSEQQPIEKQSDDCSGEWDTHMQEQPIGEDQGNEKAAGQRKGRNRGRGKGRGRGQPHQNQNQNNNHSHNQNHNHNGRGNHHHHHHHQVGTQPSNNPMNNMEQPGMGKQQPPGPRMPDGTRGFSMGRGKPVMVQAE

SEQ ID NO: 590 - DNA, 1548 bp, Populus balsamifera subsp. trichocarpa
  misc_feature (1)..(1548): Ceres GDNA ANNOT ID no. 1455805
atggcacaacaaaatcaagaagaagaagaagaagaagtggtagcgatagtagaatctgtacctgaatccctagatcaatcctcttcttcttcttcttctggtccttcgctttctcgtaacgtgtccttcagtaaactcaacgcgcaagctccagcctttgtccccacgcgcccccaatctcagcctcaacctccaccacgaatgaccgtgatccctcctcctccgcctcctcccgccgctatgatgcatatgtatccaccaccttccccgtttcatgttccgattcatagccctgtacatttgcctcacgtcatccccgtccaaaaccacccccaccaccataaccaccatcacaacagccataaccaccttcacaaccaccagcagcatcataatcagcaccaacagtatgttcctgttcggaatcataaccagcatcatcaacagcataattctaaaaaggtgcagcagcactctgacgaagaggtcgaggttattgggaataaggatgcagctgcttcttcggatcatgcctcaaagagtgacagtaaaagtgatgaagctatgaataagctcttaaatcaggtggagtactatttcagtgatttgaacctggccactactgatcatcttatgaggtttattaccaaagatcctgaaggatatgtgccaatatctgttgttgcttcctttaagaaggttaaagctgccataaacagtaattctcagcttgctaacattctgcggaactcaacaaagcttgtagttagtgacgatggaaagaaagtaaggcgccagcatcccctaactgattcagatgttgaggagttgcaatctcgtatagttgttgctgaaaatttacctgaggatcattgccaccaaaacctcatgaagatattttctgctgttgggagtgtgaagacaattcgtacctgtccacctcaaacttctggtggtggtgcttcttcagcatctagatctgcaaaagctgatgggatgcatttcagtaacaagttgcatgcatttgtggaatatgagaccattgagattgctgagaaagcagttgctgagctaaacgatgagggaaactggaggagtggtcttagggttcggttaatgctcaagcgtgggtcaaaatccactcaggcacgaggcaagaaggggcatgatggtcaagggcattcagaggaagatgagatttctgcaactgagcaaatgccgaatgataaacagacagaagatctgtcccagcagcatgatgcccattcacatgagcattctggagaggatcatgccaatgacaaggaaggtgcgcagagaaaagggcgtaaccgggggaggggcaagggacgtgggcgaggtcaataccatcataacaaccatcacaataaccgtggaaatcatctgggaacttccccttcaaataatccagttattggcgagcatccagcaatggccaagcaacctccagggccacggatgccagatggcactagaggatttgcaatgggtcgagggaagccggctgctgttaataatatcgcatga

SEQ ID NO: 591 - protein, 448 aa, Populus balsamifera subsp. trichocarpa
  misc_feature (1)..(448): Ceres GDNA ANNOT ID no. 1455805
  misc_feature (1)..(448)
  Functional Homolog of CDNA ID no. 13592165at SEQ ID no. 589with e-value of 6E-134 and percent identity of 65.34
MTVIPPPPPPPAAMMHMYPPPSPFHVPIHSPVHLPHVIPVQNHPHHHNHHHNSHNHLHNHQQHHNQHQQYVPVRNHNQHHQQHNSKKVQQHSDEEVEVIGNKDAAASSDHASKSDSKSDEAMNKLLNQVEYYFSDLNLATTDHLMRFITKDPEGYVPISVVASFKKVKAAINSNSQLANILRNSTKLVVSDDGKKVRRQHPLTDSDVEELQSRIVVAENLPEDHCHQNLMKIFSAVGSVKTIRTCPPQTSGGGASSASRSAKADGMHFSNKLHAFVEYETIEIAEKAVAELNDEGNWRSGLRVRLMLKRGSKSTQARGKKGHDGQGHSEEDEISATEQMPNDKQTEDLSQQHDAHSHEHSGEDHANDKEGAQRKGRNRGRGKGRGRGQYHHNNHHNNRGNHLGTSPSNNPVIGEHPAMAKQPPGPRMPDGTRGFAMGRGKPAAVNNIA

SEQ ID NO: 592 - DNA, 1452 bp, Populus balsamifera subsp. trichocarpa
  misc_feature (1)..(1452): Ceres GDNA ANNOT ID no. 1529744
atggcacaacaaaatcaagaagaagaagaagagttagtggctgtagtagaatctgtacctgaaaccctagatcaatctccttcttcgtctgatccttcgctttctcgtaatgtttcctttagtaaactcaacgcacaagctcccgcctttgtccccacgcgcccccaacctcaacctcctccgcgattgtccgtgatccctccccctccccctcctcccgcgggcatgatgcatatgttccctccgtctccgtttcacgttccgattcatggccctgttcccttgcctcacgtcatccccgttccgaaccaccaccaccacaacaaccaccaccaccaccataatcatcccaatcagcatcaacagcagtatgttccggttcgaaagcataatcagctgcataattctaaaagggtgccgcagcaatttgaggaagaggttgaagtggttgtgaataaggatgcagcagcttcttcggatcatgcggctaagagtgatgaagctatgaataagctgttgaatcaggtggagtattatttcagtgatttgaacttggccactactgatcatcttatgaggtttatcaccaaggatcctgaaggatatgtgccaatatctgttgttgcttcctttaagaaggttaaagctgtcgtaaacaataattctcagcttgctaccattctgcggaactcaacaaagcttgtagttagtgaagatggaaagaaagtaagacgccagcatcccttaactgagtcagatgttgaggagttgcaatctcgtatagttgttgctgaaaatttacccgaggatcattgccaccaaaacctcatgaagatcttttctgctgttgggagtgtgaagactattcgcacctgtccacctcaaccttctggtggagcttcttcagcatctagatctggaaaagctgatgggatgcatttcagtaacaagttgcatgcatttgtggaatatgagactgtcgagattgctgagaaagcagttgctgagctaaatgatgagggaaactggaggagtggtcttaaggttcggttaatgctcaagcgtggggcacaaggaaagaaggggcatgatggtcaagggcattctgaggaagatgaggtttctgcttttgagcaaatgccgaatgaaaagctgacagaagatcaagcccagcagcctgatgtccattcacatgagcattctggagaggatcatgccaatgacaaggaaggtgcacagcgaaagcggaaccgggggcggggcaagggccgtgggcgaggtcaataccatcacaataaccaccacagtaaccacgggggaactcccccttcaaatccagttcttggtgagcatctgacaatggctaagcaaccacctgggccccgaatgcccgatggcacgagaggatttgcaatgggtcgagggaaactagttgctgtgaatatcgcatga

SEQ ID NO: 593 - protein, 408 aa, Populus balsamifera subsp. trichocarpa
  misc_feature (1)..(408): Ceres GDNA ANNOT ID no. 1529744
  misc_feature (1)..(408)
  Functional Homolog of CDNA ID no. 13592165at SEQ ID no. 589with e-value of 6.7E-119 and percent identity of 64.60
MMHMFPPSPFHVPIHGPVPLPHVIPVPNHHHHNNHHHHHNHPNQHQQQYVPVRKHNQLHNSKRVPQQFEEEVEVVVNKDAAASSDHAAKSDEAMNKLLNQVEYYFSDLNLATTDHLMRFITKDPEGYVPISVVASFKKVKAVVNNNSQLATILRNSTKLVVSEDGKKVRRQHPLTESDVEELQSRIVVAENLPEDHCHQNLMKIFSAVGSVKTIRTCPPQPSGGASSASRSGKADGMHFSNKLHAFVEYETVEIAEKAVAELNDEGNWRSGLKVRLMLKRGAQGKKGHDGQGHSEEDEVSAFEQMPNEKLTEDQAQQPDVHSHEHSGEDHANDKEGAQRKRNRGRGKGRGRGQYHHNNHHSNHGGTPPSNPVLGEHLTMAKQPPGPRMPDGTRGFAMGRGKLVAVNIA

SEQ ID NO: 594 - DNA, 1734 bp, Populus balsamifera subsp. trichocarpa
  misc_feature (1)..(1734): Ceres GDNA ANNOT ID no. 1476297
atggcacaacaaaatcaagaagaagaagaagagttagtggctgtagtagaatctgtacctgaaaccctagatcaatctccttcttcgtctgatccttcgctttctcgtaatgtttcctttagtaaactcaacgcacaagctcccgcctttgtccccacgcgcccccaacctcaacctcctccgcgattgtccgtgatccctccccctccccctcctcccgcgggcatgatgcatatgttccctccgtctccgtttcacgttccgattcatggccctgttcccttgcctcacgtcatccccgttccgaaccaccaccaccacaacaaccaccaccaccaccataatcatcccaatcagcatcaacagcagtatgttccggttcgaaagcataatcagctgcataattctaaaagggtgccgcagcaatttgaggaagaggttgaagtggttgtgaataaggatgcagcagcttcttcggatcatgcggctaagagtgatgaagctatgaataagctgttgaatcaggtggagtattatttcagtgatttgaacttggccactactgatcatcttatgaggtttatcaccaaggatcctgaaggatatgtgccaatatctgttgttgcttcctttaagaaggttaaagctgtcgtaaacaataattctcagcttgctaccattctgcggaactcaacaaagcttgtagttagtgaagatggaaagaaagtaagacgccagcatcccttaactgagtcagatgttgaggagttgcaatctcgtatagttgttgctgaaaatttacccgaggatcattgccaccaaaacctcatgaagatcttttctgctgttgggaggcaagatatttctgttcagaatgatttttcattggatggtttagcttttactgtgaagactattcgcacctgtccacctcaaccttctggtggagcttcttcagcatctagatctggaaaagctgatgggatgcatttcagtaacaagaaaatttcaagacaagatgaagaacaagtgttgctcaagacaagaagaaatcccaagaccttaaagagcaaatttgcaagcattaacaacatttcaaagttgtggctctactgcaatgtgaaaatcaaggatctatgcaaagaatcatctcaacccagaattatacaagagtttggaagaaggttgttgaaggaagttcacaatagcaagaggctcttatataatcagcggttgcatgcatttgtggaatatgagactgtcgagattgctgagaaagcagttgctgagctaaatgatgagggaaactggaggagtggtcttaaggttcggttaatgctcaagcgtggggcacaaggaaagaaggggcatgatggtcaagggcattctgaggaagatgaggtttctgcttttgagcaaatgccgaatgaaaagctgacagaagatcaagcccagcagcctgatgtccattcacatgagcattctggagaggatcatgccaatgacaaggaaggtgcacagcgaaagcggaaccgggggcggggcaagggccgtgggcgaggtcaataccatcacaataaccaccacagtaaccacgggggaactcccccttcaaatccagttcttggtgagcatctgacaatggctaagcaaccacctgggccccgaatgcccgatggcacgagaggatttgcaatgggtcgagggaaactagttgctgtgaatatcgcatga

SEQ ID NO: 595 - protein, 502 aa, Populus balsamifera subsp. trichocarpa
  misc_feature (1)..(502): Ceres GDNA ANNOT ID no. 1476297
  misc_feature (1)..(502)
  Functional Homolog of CDNA ID no. 13592165at SEQ ID no. 589with e-value of 3.5E-97 and percent identity of 64.36
MMHMFPPSPFHVPIHGPVPLPHVIPVPNHHHHNNHHHHHNHPNQHQQQYVPVRKHNQLHNSKRVPQQFEEEVEVVVNKDAAASSDHAAKSDEAMNKLLNQVEYYFSDLNLATTDHLMRFITKDPEGYVPISVVASFKKVKAVVNNNSQLATILRNSTKLVVSEDGKKVRRQHPLTESDVEELQSRIVVAENLPEDHCHQNLMKIFSAVGRQDISVQNDFSLDGLAFTVKTIRTCPPQPSGGASSASRSGKADGMHFSNKKISRQDEEQVLLKTRRNPKTLKSKFASINNISKLWLYCNVKIKDLCKESSQPRIIQEFGRRLLKEVHNSKRLLYNQRLHAFVEYETVEIAEKAVAELNDEGNWRSGLKVRLMLKRGAQGKKGHDGQGHSEEDEVSAFEQMPNEKLTEDQAQQPDVHSHEHSGEDHANDKEGAQRKRNRGRGKGRGRGQYHHNNHHSNHGGTPPSNPVLGEHLTMAKQPPGPRMPDGTRGFAMGRGKLVAVNIA

SEQ ID NO: 596 - protein, 505 aa, Oryza sativa subsp. japonica
  misc_feature (1)..(505): Public GI no. 62734646
  misc_feature (1)..(505)
  Functional Homolog of CDNA ID no. 13592165at SEQ ID no. 589with e-value of 5.2E-95 and percent identity of 50.74
MSQQEVADPAQAAEEEGPGELPRSGSSSRLNAQAPEFVPRAAAAPPQAAVAAPPPPPQVIRVFAAAPPPPPAAFFAAVPPPPPPPFEYYPAVGGGGGFGAPVELEAEAEQQPPPGQQSGRDGISDDVVHKITKQLARGCLLVHAVVPKVEYYFSDINLATTEHLMRFITKDPEGYVPISVVAGFKKIKALIQSNAMLASALRTSSKLVVSNDGTRVKREQPFTESDLEELQARIVVAENLPDDHCYQNLMKLFSTVGSVKTIRTCYPQTPNGTGPVTNRSAKLDMLFANKLHAFVEYDTVEDAEKAIVELNDERNWRNGLRVRLLNTCMTKGGKGKKGGHDINDGHGVEDDVSTSNQSNEKHGEEALQTPDAQGEQLPDESAGDMGRGRGKGRGRGGRGRGRGYHYHNNNQQSYHNHQQHNHQNSNNRNAAHPVGTPPSNHPAKNEQQQQAQPQPQPQPQPQPPAGANKQPPGPRMPDGTRGFAMGRGKPQTSTTTPSASSGSEP

SEQ ID NO: 597 - protein, 487 aa, Zea mays
  misc_feature (1)..(487): Ceres CLONE ID no. 218213
  misc_feature (1)..(487)
  Functional Homolog of CDNA ID no. 13592165at SEQ ID no. 589with e-value of 1.7E-84 and percent identity of 45.15
MEGSTDQIAAGWFAKEPASERPVGLPRTGSSSRLNAQAPEFVPRGPPPPAPAVVLPPPPQVIRMFAAPPPPPRGGFFSAPQPRPFEYYAPIGERSGFAAKEQQAPELEAEMLPPAAVKTEPVVDGLDDEVVHKITKQVEYYFSDINLATTEHLMRFITKDSEGYVPISVIAGFKKVKTSVRNNVMLAAALRTSSKLVVSDDGKRVKRQQPFTESDLQELQSRIVVAENLPGDPSYQNLKKIFSAVGSLISIRTCYPQTPNGTGPATNRSSKLDMLFANKLHAFVEYETPEDAAKAILELNDEKNWRNGLRVRLLNTCTVKGAGKGKNGMNETDGNSEEDVSTLNHSNEKQFEQSSQLLDVLPEHLFDENFNKEVPKRGKGRGHGGRGHGRGNHQYNNHHHNNQHHQNNQPQYNNHGNNHLGGNRGSLHSVGTTPHNLITKLEPHPQLPIGANKLPPGPRMPDGTRGFTMGRGKPQAVLPGLCAVGVE

SEQ ID NO: 598 - protein, 427 aa, Oryza sativa subsp. japonica
  misc_feature (1)..(427): Public GI no. 50948139
  misc_feature (1)..(427)
  Functional Homolog of CDNA ID no. 13592165at SEQ ID no. 589with e-value of 9.7E-88 and percent identity of 50.47
MAQDDAPDSTTSSSSASSASAPAPSAARLNAAAPEFTPRSAAHHHHHHANPRRQHRGGGGGAYHHHQQHYQPHHHHQHHQHWQHYGEDEGDAAAAGAVGEGGIPEDVARRVVKQVEFYFSDVNLATTEHLMKFMIRDPEGFVPMSVVASFRKIRELVSERSALAAVLRTSAELVVSDDGKRVRRRVLFTEADAEEVQSRIVVAENLREEHRYPNLMKIFSAFGSVKSIRTCYPQGGIDGAGTSTGKASKIEMLFANKVHAFVEYETVEDAEKAVSEFSSGRSWRDGIRVRSLLGCLKQAMGQGRRGGDEVDAADEDDPETTDHPQDYETEDASQISEAHLDHQADDGYHDKGGMRHGRGRGRGGRGRGRGQYYGHSRDANHPIGTPPSNHSALADHPSKPPPGPRMPDGTRGFTMGRGKPLNPTNAV

SEQ ID NO: 599 - DNA, 348 bp, Arabidopsis thaliana
  misc_feature (1)..(348): Ceres CDNA ID no. 23495481
  misc_feature (1)..(348): Also Known As  Ceres SEEDLINE ME10627
atgttttttgcgcatgttagtggctgcaacacttgctttccacctaccccaattcctaaccttaaccctatcagcaatcctacaacgcctagttgctcaagagacgccataaaacttggagtttgcgccaaaatactagacgttgcagtcggaactgtcattggaaacccatccgacacgctttgctgctcagttcttcaagggcttgtcgatcttgatgctgccgtatgtctttgcaccaccattaaagctaacattctcgggattaacatcgaccttcccatctcgttgagtttgctcatcaatacttgcggcaaaaagcttccctctgattgcatttgcgcctga

SEQ ID NO: 600 - protein, 115 aa, Arabidopsis thaliana
  misc_feature (1)..(115): Ceres CDNA ID no. 23495481
  misc_feature (1)..(115): Also Known As  Ceres SEEDLINE ME10627
  misc_feature (32)..(112): Pfam Name: Tryp_alpha_amyl Pfam Description: Protease inhibitor/seed storage/LTP family
  misc_feature: Phenotype: Late Flowering Useful for delaying flowering time
  misc_feature: Phenotype: Dark Green Useful for increasing chlorophyll and photosynthetic capacity
  misc_feature: Phenotype: Serrate Margins Useful for making plants with increased biomass and foliage
  misc_feature: Phenotype: Trident Shaped Useful for making plants with increased biomass and foliage
MFFAHVSGCNTCFPPTPIPNLNPISNPTTPSCSRDAIKLGVCAKILDVAVGTVIGNPSDTLCCSVLQGLVDLDAAVCLCTTIKANILGINIDLPISLSLLINTCGKKLPSDCICA

SEQ ID NO: 601 - protein, 115 aa, Brassica napus
  misc_feature (1)..(115): Ceres CLONE ID no. 980164
  misc_feature (1)..(115)
  Functional Homolog of CDNA ID no. 23495481at SEQ ID no. 600with e-value of 8.6E-48 and percent identity of 84.48
MFFACVSGCNTCLPPKPIPNPNPISNPTKHSCPRDALKLGVCAKILDGAVGTVIGNPPDTPCCSFLQGLVDLEAAVCLCTAIKANILGIDINIPISLSLLINTCGKKLPSDFICA

SEQ ID NO: 602 - protein, 132 aa, Oryza sativa subsp. japonica
  misc_feature (1)..(132): Public GI no. 37536722
  misc_feature (1)..(132)
  Functional Homolog of CDNA ID no. 23495481at SEQ ID no. 600with e-value of 1.8E-22 and percent identity of 62.00
MAAKAALVLAVSLLVVAMAVACPDCPSPKPPAPRPKPPTPHYGGGSSCPRDALKLHVCANVLGLVKAKVGAVSPYEPCCSLLDGLVDLDAAVCLCTAIKANVLGIKLNLPIDLSLILNNCGKICPSDYQCVH

SEQ ID NO: 603 - protein, 124 aa, Oryza sativa subsp. japonica
  misc_feature (1)..(124): Public GI no. 37536720
  misc_feature (1)..(124)
  Functional Homolog of CDNA ID no. 23495481at SEQ ID no. 600with e-value of 2.2E-24 and percent identity of 61.62
MAAKAALVLAVSLLAVAVAASACGTDCPPAPRPRPSTGSCPRDALKLRVCANVLGLVKAKVGAVAPYEPCCSLLDGLVDLDAAVCLCTAVKANVLGIKLDLPVDLSLILNNCGKICPSDFKCVH

SEQ ID NO: 604 - protein, 133 aa, Zea mays
  misc_feature (1)..(133): Ceres CLONE ID no. 373282
  misc_feature (1)..(133)
  Functional Homolog of CDNA ID no. 23495481at SEQ ID no. 600with e-value of 1.5E-25 and percent identity of 60.38
MAARAALLQLAVSLVILAAVASASATNCPPPPLPPAPKPPTPGGHHGHGSCPRNALKLGVCANVLGLVKAKVGSPPYEPCCSLLDGLVDLEAAVCLCTAVKANILGINLNLPIDLSLILNNCGKNCPNDFHCA

SEQ ID NO: 605 - protein, 133 aa, Oryza sativa subsp. japonica
  misc_feature (1)..(133): Public GI no. 37536718
  misc_feature (1)..(133)
  Functional Homolog of CDNA ID no. 23495481at SEQ ID no. 600with e-value of 5.2E-25 and percent identity of 60.19
MAAKAALVLAVSLLVVAVASACTYCPEPPTPKPKPPAPRPPTPGGGAGSCPRDALKLHVCANVLGLVKAKIGAVAPYEPCCSLLDGLVDLDAAVCLCTAIKANVLGLNLNIPIDLSLILNNCGKICPSDYQCA

SEQ ID NO: 606 - protein, 142 aa, Capsicum chinense
  misc_feature (1)..(142): Public GI no. 60542797
  misc_feature (1)..(142)
  Functional Homolog of CDNA ID no. 23495481at SEQ ID no. 600with e-value of 3.3E-30 and percent identity of 59.65
MASKKTTTLALFILVNLLFFSLVSACGTCPSPKPKPKPKPKPTPTPKPTPSPGSKGKCPIDALKLGICANVLGNLLGVVLGNPPKKPCCSLIQGLVDLEAALCLCTALKANILGINLNVPISLSLLLNVCGKKVPSGFQCPN

SEQ ID NO: 607 - protein, 113 aa, Glycine max
  misc_feature (1)..(113): Ceres CLONE ID no. 620364
  misc_feature (1)..(113)
  Functional Homolog of CDNA ID no. 23495481at SEQ ID no. 600with e-value of 4.3E-30 and percent identity of 59.26
  misc_feature (65)..(65): Xaa is any aa, unknown, or other
MASGCYTCTQPKPNPIPFPYPNPSPAAKSCPRDALKLGVCANVLNGPIGAIVGSPPDHPCCSVLXGLLDLEVAVCLCTAIKANIFGINLNIPISLSLILNACEKSPPSDFLCN

SEQ ID NO: 608 - protein, 138 aa, Lycopersicon esculentum
  misc_feature (1)..(138): Public GI no. 46095207
  misc_feature (1)..(138)
  Functional Homolog of CDNA ID no. 23495481at SEQ ID no. 600with e-value of 1.4E-29 and percent identity of 57.89
MASKRTTSLALFVLVNLLFFTLVSACGTCPGPKPKPKPKPKPKPTPSPSSKGKCPIDTLKLGVCANVLGNLLGVVLGNPPKKPCCSLIEGLVDLEAALCLCTAIKANILGINLNVPLSLSLLLNVCGKKAPSGFQCPK

SEQ ID NO: 609 - DNA, 432 bp, Populus balsamifera subsp. trichocarpa
  misc_feature (1)..(432): Ceres GDNA ANNOT ID no. 1447245
atggcttccaaaagcacagcatcagttgctctctttcttgcactcaacctcctcttcttttccctagtcacggcctgtggagggggttgcccgtctccaaaaccaaagccaaagccaaagccaaagccaaagccaacaccaacaccaacaccaacaccaagcccttccggtggaaagtgccctaaagatgcacttaaattaggtgtatgtgctgatttgctcggttcattgcttaatgtcaccgttggcagtccccctgtaaagccttgctgcagtgtcattcaaggccttcttgatctcgaggctgctgtttgcctttgcactgccatcaaagctaacatcctgggtatcaaccttaacatcccactctctctaagcttgcttctcaatgtctgtggaaagaaagtccccaaagacttccaatgttcctaa

SEQ ID NO: 610 - protein, 143 aa, Populus balsamifera subsp. trichocarpa
  misc_feature (1)..(143): Ceres GDNA ANNOT ID no. 1447245
  misc_feature (1)..(143)
  Functional Homolog of CDNA ID no. 23495481at SEQ ID no. 600with e-value of 9.1E-28 and percent identity of 56.90
MASKSTASVALFLALNLLFFSLVTACGGGCPSPKPKPKPKPKPKPTPTPTPTPSPSGGKCPKDALKLGVCADLLGSLLNVTVGSPPVKPCCSVIQGLLDLEAAVCLCTAIKANILGINLNIPLSLSLLLNVCGKKVPKDFQCS

SEQ ID NO: 611 - protein, 138 aa, Catharanthus roseus
  misc_feature (1)..(138): Public GI no. 4454097
  misc_feature (1)..(138)
  Functional Homolog of CDNA ID no. 23495481at SEQ ID no. 600with e-value of 1.3E-28 and percent identity of 56.52
MASKSTSALALFLALNLIFFTLVSACGDCPKPKPKPKPKPKPSCPPPPYVPKATCPRDALKLGVCADLLGGLISAVIGAPPKTPCCSLIEGLADLEAAVCLCTAIKANVLGINLNVPVSLSLLLNVCSKKVPEGFICA

SEQ ID NO: 612 - protein, 141 aa, Populus nigra
  misc_feature (1)..(141): Public GI no. 1199774
  misc_feature (1)..(141)
  Functional Homolog of CDNA ID no. 23495481at SEQ ID no. 600with e-value of 5.6E-28 and percent identity of 56.52
MASKSTASLALFLALNLLFFSLVTACGGGCPSPKPKPKPKPKPKPTPTPTPSPSGGKCPKDALKLGVCADLLGSLLNVTVGTPPVKPCCSVIQGLLDLEAAVCLCTAIKANILGINLNIPLSLSLLLNVCGKKVPKDFQCS

SEQ ID NO: 613 - protein, 138 aa, Catharanthus roseus
  misc_feature (1)..(138): Public GI no. 407410
  misc_feature (1)..(138)
  Functional Homolog of CDNA ID no. 23495481at SEQ ID no. 600with e-value of 2.7E-28 and percent identity of 55.65
MASKSTSALALFLALNLIFFTLVSACGDCPKPKPKPKPKPKPSCPPPPYVPKATCPRDALKLGVCADLLGGLISAVIGAPPKTPCCSLIEGLADLEAAVCLCTAIKANVLGINLNVPVSLTLLLNVCSKKVPEGFICA

SEQ ID NO: 614 - protein, 130 aa, Nicotiana tabacum
  misc_feature (1)..(130): Public GI no. 10798758
  misc_feature (1)..(130)
  Functional Homolog of CDNA ID no. 23495481at SEQ ID no. 600with e-value of 1.8E-29 and percent identity of 54.46
MASKKTTSLALFLLVNLLFFSLVSACGTCPSPKPKPKPSPSPSKGKCPIDTLKLGVCANVLGNLLGLVIGNPPKKPCCTLIQGVADLEAAICLCTAIKANILGINLNVPLSLSLLLNVCGKQVPSGFQCP

SEQ ID NO: 615 - protein, 137 aa, Daucus carota
  misc_feature (1)..(137): Public GI no. 18316
  misc_feature (1)..(137)
  Functional Homolog of CDNA ID no. 23495481at SEQ ID no. 600with e-value of 8.2E-27 and percent identity of 54.39
MGSKNSASVALFFTLNILFFALVSSTEKCPDPYKPKPKPTPKPTPTPYPSAGKCPRDALKLGVCADVLNLVHNVVIGSPPTLPCCSLLEGLVNLEAAVCLCTAIKANILGKNLNLPIALSLVLNNCGKQVPNGFECT

SEQ ID NO: 616 - protein, 136 aa, Capsicum annuum
  misc_feature (1)..(136): Public GI no. 60459393
  misc_feature (1)..(136)
  Functional Homolog of CDNA ID no. 23495481at SEQ ID no. 600with e-value of 8.2E-27 and percent identity of 54.39
MASKNVFPSTLALFLCLNLFFAVVSGCGTCPKPKPKPKPKPSCPPPPYYPTETCPIDTLKLGVCADVLGLVNAVIGSPPVTPCCSLLSGLANAEAALCLCTAIKANILGINLNVPVSLSLLLNVCSKEAPAGFQCS

SEQ ID NO: 617 - DNA, 427 bp, Arabidopsis thaliana
  misc_feature (1)..(427): Ceres CDNA ID no. 12346799
  misc_feature (1)..(427): Also Known As  Ceres SEEDLINE ME10728
  misc_feature (1)..(427): Also Known As  Ceres CLONE ID no. 349585
tgaagataggtagctggatgtctggacgatcagatcccacttggttaatgacacggtgcaagcacatgatggtatctaaagctctactacgtcatcttatttttggctgatgacttggacaatactgccagggcaagcagcctgcgtgacggagttctgacccttttaattcttaggcatttctaacatttgatttcatctctacacgaactgattaaatggccattgggaggagactgcacacggcatcatcggtgaggaggttagtcgacgggaggttgtttacttgtttgtgttgccgctctgtaatgtactgtaggaggcaagtctgagtcgagggacaagagctgcaaggcttggcttgcccgtgtaccccgcatttgtgtaccctgtttttttacttgtgatgttgtatttccttcggttt

SEQ ID NO: 618 - protein, 37 aa, Arabidopsis thaliana
  misc_feature (1)..(37): Ceres CDNA ID no. 12346799
  misc_feature (1)..(37): Also Known As  Ceres SEEDLINE ME10728
  misc_feature (1)..(37): Also Known As  Ceres CLONE ID no. 349585
  misc_feature: Phenotype: Late Flowering Useful for delaying flowering time
  misc_feature: Phenotype: Dark Green Useful for increasing chlorophyll and photosynthetic capacity
  misc_feature: Phenotype: Large Useful for making larger plants
  misc_feature: Phenotype: Short Internode Useful for making shorter plants and plants with modified flowers
  misc_feature: Phenotype: Reduced fertility Useful for sterility, genetic confinement systems
MAIGRRLHTASSVRRLVDGRLFTCLCCRSVMYCRRQV

SEQ ID NO: 619 - DNA, 341 bp, Arabidopsis thaliana
  misc_feature (1)..(341): Ceres CDNA ID no. 23531413
  misc_feature (1)..(341): Also Known As  Ceres SEEDLINE ME10823
acatggataaccatcgcaggactaagcaacccaagaccaactccatcgttacttcttcttctgaaggaacagaagtgagtagtcttgagtgggaagttgtgaacatgagtcaagaagaagaagatttggtctctcgaatgcataagcttgtcggtgacaggtgggaactgatagctgggaggatcccaggaagaaccgctggagaaattgagaggttttgggtcatgaaaaattgaaaagtgatcaatatatctctatagtttcactgattgtttcgattatattccgttgtattttaaatttaccaactctgttataagaagaaaactttcttaaatccc

SEQ ID NO: 620 - protein, 77 aa, Arabidopsis thaliana
  misc_feature (1)..(77): Ceres CDNA ID no. 23531413
  misc_feature (1)..(77): Also Known As  Ceres SEEDLINE ME10823
  misc_feature (32)..(77): Pfam Name: Myb_DNA-binding Pfam Description: Myb-like DNA-binding domain
  misc_feature: Phenotype: Glabrous Useful for making plants with  enhanced chemical composition
MDNHRRTKQPKTNSIVTSSSEGTEVSSLEWEVVNMSQEEEDLVSRMHKLVGDRWELIAGRIPGRTAGEIERFWVMKN

SEQ ID NO: 621 - protein, 57 aa, Brassica napus
  misc_feature (1)..(57): Ceres CLONE ID no. 1104601
  misc_feature (1)..(57)
  Functional Homolog of CDNA ID no. 23531413at SEQ ID no. 620with e-value of 4.1E-20 and percent identity of 71.83
MTEEEEDLISRMYKLVGDRWELIAGRIPGRTPEEIERYWLMKHGVVFANRPRDFVRR

SEQ ID NO: 622 - protein, 62 aa, Brassica napus
  misc_feature (1)..(62): Ceres CLONE ID no. 1100450
  misc_feature (1)..(62)
  Functional Homolog of CDNA ID no. 23531413at SEQ ID no. 620with e-value of 2.5E-16 and percent identity of 75.81
MDRRRRKQSKAKASCSEEVSSIEWETVKMSEEEEDLISRMYKLVGDRWELIAGRIPGRTPEE

SEQ ID NO: 623 - DNA, 285 bp, Populus balsamifera subsp. trichocarpa
  misc_feature (1)..(285): Ceres GDNA ANNOT ID no. 1467420
atggaccgccgccgacgccgacgccgcaaacaagctaaaattaacaattctgagtctgaagaggtcagtagtattgaatgggagtttatagacatgagtgaacaagaggaagacctcatttacagaatgtataggcttgttggagaaaggtgggatttgatagctggaaggattccaggccgtaaagcagaagaaatagagaggttttggataatgaaacaccgtgaaggttttgctgagaaacgaaggttgcatagcaaagcgaagtctaagacttatcgttag

SEQ ID NO: 624 - protein, 63 aa, Populus balsamifera subsp. trichocarpa
  misc_feature (1)..(63): Ceres GDNA ANNOT ID no. 1467420
  misc_feature (1)..(63)
  Functional Homolog of CDNA ID no. 23531413at SEQ ID no. 620with e-value of 1E-12 and percent identity of 72.09
MSEQEEDLIYRMYRLVGERWDLIAGRIPGRKAEEIERFWIMKHREGFAEKRRLHSKAKSKTYR

SEQ ID NO: 625 - DNA, 288 bp, Populus balsamifera subsp. trichocarpa
  misc_feature (1)..(288): Ceres GDNA ANNOT ID no. 1483277
atggagagtatgaaccgccgccgccgccggaaacaacctaaaattaacagttctgagtctgaagaggtcagtagtattgaatgggagtttataaacatgagcgagcaagaggaagacctcatttacagaatgcatagacttgttggtgaaaggtgggatttgatagctggaaggattccaggccgaaaagcagaagaaatagagaggttttggataatgaaacaccgcgaagggtttgctgaaaacggaaaattgtataacgaagtgaagtctaggacttctagttga

SEQ ID NO: 626 - protein, 95 aa, Populus balsamifera subsp. trichocarpa
  misc_feature (1)..(95): Ceres GDNA ANNOT ID no. 1483277
  misc_feature (1)..(95)
  Functional Homolog of CDNA ID no. 23531413at SEQ ID no. 620with e-value of 2.3E-22 and percent identity of 70.83
MESMNRRRRRKQPKINSSESEEVSSIEWEFINMSEQEEDLIYRMHRLVGERWDLIAGRIPGRKAEEIERFWIMKHREGFAENGKLYNEVKSRTSS

SEQ ID NO: 627 - protein, 198 aa, Gossypium hirsutum
  misc_feature (1)..(198): Public GI no. 2921332
  misc_feature (1)..(198)
  Functional Homolog of CDNA ID no. 23531413at SEQ ID no. 620with e-value of 2.8E-10 and percent identity of 65.00
MAPKKAGVSKRVFNKGSWTAEEDRRLAKYIEIHGAKRWKTIAIKSGLNRCGKSCRLRWLNYLRPNIKRGNISDEEEDLIIRLHKLLGNRWSLIAGRLPGRTDNEIKNYWNSHLSKKMINHDVRTEQTSSSEQIVPHKAWETVQMEEEEVVKGSDEIENSEFSIDVDEFFDFSTEGCFGLDWVNKFLELDDQQDPLAMV

SEQ ID NO: 628 - protein, 198 aa, Gossypium arboreum
  misc_feature (1)..(198): Public GI no. 51872289
  misc_feature (1)..(198)
  Functional Homolog of CDNA ID no. 23531413at SEQ ID no. 620with e-value of 2.8E-10 and percent identity of 65.00
MAPKKDGVSKRVFNKGSWTAEEDRRLAKYIEIHGAKRWKTIAIKSGLNRCGKSCRLRWLNYLRPNIKRGNISDEEEDLIIRLHKLLGNRWSLIAGRLPGRTDNEIKNYWNSHLSKKIINHDVRTEQTSSSEQIVPHKAWETVQMEEEEVVKGSDEIENSEFSIDVDEFFDFTTEGCFSLDWVNKFLELDDQQDPLAMV

SEQ ID NO: 629 - protein, 80 aa, Glycine max
  misc_feature (1)..(80): Ceres CLONE ID no. 711042
  misc_feature (1)..(80)
  Functional Homolog of CDNA ID no. 23531413at SEQ ID no. 620with e-value of 1.1E-17 and percent identity of 64.06
MSTTATTTSEEVSSNEWKVIHMSEQEEDLIRRMYKLVGDKWNLIAGRIPGRKAEEIERFWIMRHGDAFSVKRNGSKTQDS

SEQ ID NO: 630 - protein, 107 aa, Oryza sativa subsp. japonica
  misc_feature (1)..(107): Public GI no. 54290864
  misc_feature (1)..(107)
  Functional Homolog of CDNA ID no. 23531413at SEQ ID no. 620with e-value of 4.5E-14 and percent identity of 54.55
MESSGGSQLGKNSKTSDGRETKATSSLLLLITAIHFVALCPKGENEDARKEVNSTAQNFVHFTEEEEDIVFRMHRLVGNRWELIAGRIPGRTAEEVEKFWAIKHQAT

SEQ ID NO: 631 - protein, 113 aa, Zea luxurians
  misc_feature (1)..(113): Public GI no. 15042122
  misc_feature (1)..(113)
  Functional Homolog of CDNA ID no. 23531413at SEQ ID no. 620with e-value of 7.3E-10 and percent identity of 62.50
  misc_feature (109)..(109): Xaa is any aa, unknown, or other
MGRRACCAKEGVKRGAWTTKEDDALAAYVKAHGEGKWREVPQKAGLRRCGKSCRLRWLNYLRPNIRRGNISYDEEDLIIRLHKLLGNRWSLIAGRLPGRTDNEIKNYWXSTLV

SEQ ID NO: 632 - DNA, 778 bp, Arabidopsis thaliana
  misc_feature (1)..(778): Ceres CDNA ID no. 13606025
  misc_feature (1)..(778): Also Known As  Ceres SEEDLINE ME10830
gtagtgtaacatagtatttgatttgtatactaaaataaatgtaaaatttatcgggctgttgtacctggcaagtacaccatatgtgtactctctcctcaatgctctcgtcataatctttccatgtcttcttctctctatatatattacttaactctttctcactctctctaattttaaatttatctatcattagtttaaaccgccggagaacaaaaaatgaagcatctcatccgccgcctctctagagtcgccgactcatcctccgaattctccatccgccgttccacctcctccttccgcaaccgtcgcggtcaccatcgtctccacgcgccgccgcctccgtggtcaatatgtccagctagaagagtcaacaccgtccccgctggtcacgtacctgtctacgtcggcgaggagatggagaggttcgtggttagcgcagagcttatgaaccacccgatcttcgttggtttgctaaaccgatccgctcaagaatacggttacgctcagaaaggagttcttcatatcccttgccacgtcatcgtgtttgagcgcgtggtggaaacgctccggttgggagggtttgaagggtccggtgatctagagaatcttgtggcttcgttgctctccggtgatgagttgatacctgaaactacagagtagcttttgaagaagaatccaaatcggcgatttgatattttctctgttttctctgttttctttcaattttccgtttttttactttctcgattttgtaaacatataattatatatacaccag

SEQ ID NO: 633 - protein, 147 aa, Arabidopsis thaliana
  misc_feature (1)..(147): Ceres CDNA ID no. 13606025
  misc_feature (1)..(147): Also Known As  Ceres SEEDLINE ME10830
  misc_feature (14)..(118): Pfam Name: Auxin_inducible Pfam Description: Auxin responsive protein
  misc_feature: Phenotype: Late Flowering Useful for delaying flowering time
  misc_feature: Phenotype: Lanceolate Shaped Useful for making plants with increased biomass and foliage
MKHLIRRLSRVADSSSEFSIRRSTSSFRNRRGHHRLHAPPPPWSICPARRVNTVPAGHVPVYVGEEMERFVVSAELMNHPIFVGLLNRSAQEYGYAQKGVLHIPCHVIVFERVVETLRLGGFEGSGDLENLVASLLSGDELIPETTE

SEQ ID NO: 634 - protein, 145 aa, Brassica napus
  misc_feature (1)..(145): Ceres CLONE ID no. 1083282
  misc_feature (1)..(145)
  Functional Homolog of CDNA ID no. 13606025at SEQ ID no. 633with e-value of 6.3E-64 and percent identity of 88.28
MKHLIRRLSRVADSSTEFSLRRSTFSFRTRRGHHRLHAQPPWSICQARRVNTVPAGHVPVYVGEEMERFIVSAELLNHPVFVGLLNRSAQEYGYAQKGVLHIPCHVIVFERVVETLRLGFNESGEVQELVASLLSGDEVIPGTTE

SEQ ID NO: 635 - protein, 108 aa, Brassica napus
  misc_feature (1)..(108): Ceres CLONE ID no. 1068274
  misc_feature (1)..(108)
  Functional Homolog of CDNA ID no. 13606025at SEQ ID no. 633with e-value of 8.5E-60 and percent identity of 84.83
  misc_feature (107)..(107): Xaa is any aa, unknown, or other
MQPPWSICQARRVNTVPAGHVPVYVGEEMERFVVSAELLNHPVFVGLLNRSAQEYGYAQKGVLHIPCHVIVFERVVETLRSGYNEPGEMQELVASLLSGDELLPGTXE

SEQ ID NO: 636 - protein, 126 aa, Zea mays
  misc_feature (1)..(126): Ceres CLONE ID no. 1064745
  misc_feature (1)..(126)
  Functional Homolog of CDNA ID no. 13606025at SEQ ID no. 633with e-value of 5.3E-35 and percent identity of 65.87
MKHLIRRLSRVADSANYSLLRSDSQRPSRRPPAPRRSKKHTSSVPEGHVPVYVGDEMERFVVSAELLNHPVFIGLLNRSTQEYGYEQKGVLQIPCHVLVFERIMESLRLGLAVPSDLQDVIGDETI

SEQ ID NO: 637 - protein, 138 aa, Glycine max
  misc_feature (1)..(138): Ceres CLONE ID no. 627586
  misc_feature (1)..(138)
  Functional Homolog of CDNA ID no. 13606025at SEQ ID no. 633with e-value of 1.1E-29 and percent identity of 56.62
MKQLIRRLSRVADSSNYTLLRSDSSQACHHRRPRAESFRLSAPSKIRRSSAAVVPEGHVPIYVGDEMERFVVCAELLNHPVFVKLLNESAQEYGYEQKGVLRLPCRVFVFERVLDALRLGLNARDIAELVNFSPEEFS

SEQ ID NO: 638 - protein, 139 aa, Glycine max
  misc_feature (1)..(139): Ceres CLONE ID no. 1169018
  misc_feature (1)..(139)
  Functional Homolog of CDNA ID no. 13606025at SEQ ID no. 633with e-value of 9.4E-22 and percent identity of 58.76
MKQLIRRLSRVADSSNYTLLRADSAASQRCHHRRRRAESFRLAAAAKIRRSSAVVPEGHVPIYVGDEMERFVVCAELLNHPVFVKLLNESAQEYGYEQKGVLRLPCRVFVFERVLDALRLGLDARDVAELVNFSPEEFS

SEQ ID NO: 639 - protein, 122 aa, Zea mays
  misc_feature (1)..(122): Ceres CLONE ID no. 232678
  misc_feature (1)..(122)
  Functional Homolog of CDNA ID no. 13606025at SEQ ID no. 633with e-value of 8.4E-14 and percent identity of 40.50
MRGLLRCVSTGACRVAPGAVAEPVPASPGATGGKVPAGHVPVEVGAEGEETQRFVVPAELLGRPPIAELLRHAAQEYGYARRGPLRIPCPVAAFRLLLGALAGSGAGGPDGALTLAYFAVAV

SEQ ID NO: 640 - protein, 103 aa, Zea mays
  misc_feature (1)..(103): Ceres CLONE ID no. 443590
  misc_feature (1)..(103)
  Functional Homolog of CDNA ID no. 13606025at SEQ ID no. 633with e-value of 4.8E-11 and percent identity of 35.92
MGKSASVQRGHVPVLVGEAGKEEELRRVLVHRKVLQHPYFAGLLELAAAEFGHGQKGVLRIPCDVRRFHGVVQLIRRSRTRRRKKVTVPCLVFLRTDLVIRDP

SEQ ID NO: 641 - protein, 126 aa, Triticum aestivum
  misc_feature (1)..(126): Ceres CLONE ID no. 678915
  misc_feature (1)..(126)
  Functional Homolog of CDNA ID no. 13606025at SEQ ID no. 633with e-value of 2.2E-16 and percent identity of 50.89
MKRLFRRLSRVAAADSSSAAAAADSSSAAAATAYRQLRAPKQASTTGGAKVPQGHVPVCVGEEGGPVERFAVRADLLGRPAFAALLLRAAQEYGYDHPGALRIPCPVADFRRLLVRLSDDPYADEC

SEQ ID NO: 642 - protein, 120 aa, Triticum aestivum
  misc_feature (1)..(120): Ceres CLONE ID no. 1048159
  misc_feature (1)..(120)
  Functional Homolog of CDNA ID no. 13606025at SEQ ID no. 633with e-value of 3.1E-14 and percent identity of 51.00
MKRLFRRLSRVAAADSSSAAAATAYRQLRAPKQSASAAGGGCAKVPQGHVPVCVGEEGGPVERFAVRADLLGRPAFAALLLRAAQEYGYGHPGALRIPCPVADFRRLLVRLSDDPYADEC

SEQ ID NO: 643 - protein, 122 aa, Oryza sativa subsp. japonica
  misc_feature (1)..(122): Public GI no. 53793564
  misc_feature (1)..(122)
  Functional Homolog of CDNA ID no. 13606025at SEQ ID no. 633with e-value of 2.9E-07 and percent identity of 47.76
MASASSQFSLPKHTLPGSITRAAAGHSSGVVAEMKAGYVPVLVGKSGGGGGEAATRFLVPVGLLNDPCMEALLELAADEMGYGQEGVLIIPCDADFFRRVVTAIPSANKANLICSPNSQTDC

SEQ ID NO: 644 - protein, 111 aa, Oryza sativa subsp. japonica
  misc_feature (1)..(111): Public GI no. 34909878
  misc_feature (1)..(111)
  Functional Homolog of CDNA ID no. 13606025at SEQ ID no. 633with e-value of 1.9E-07 and percent identity of 32.43
MHTLPGSITRAAAGHSSGVVAEMKAGYVPVLVGKSGGGGGEAATRFLVPVGLLNDPCMEALLELAADEMGYGQEGVLIIPCDADFFRRVVTAIPSANKANLICSPNSQTDC

SEQ ID NO: 645 - protein, 101 aa, Capsicum annuum
  misc_feature (1)..(101): Public GI no. 20149050
  misc_feature (1)..(101)
  Functional Homolog of CDNA ID no. 13606025at SEQ ID no. 633with e-value of 0.0000011 and percent identity of 30.69
MGLKKSNKHITQSVALKQILKRCSSFGKNENGLPHDVPKGHFVVYVGENRSRYIIPISWLTHPEFQSLLQRAEEEFGFNHDMGLTIPCDEEDFCSLMSIFR

SEQ ID NO: 646 - protein, 107 aa, Tulipa gesneriana
  misc_feature (1)..(107): Public GI no. 10185818
  misc_feature (1)..(107)
  Functional Homolog of CDNA ID no. 13606025at SEQ ID no. 633with e-value of 1.7E-08 and percent identity of 31.78
MAVRKSSNLPQAAVIRHILKRCSSFGRKNGACSDKGHSLPLDVPKGHFAVYIGEKRSRFIVPISLLAHPEFQSLLRAAEEEFGFDNDMGLTIPCEEVVFRSLTAVLC

SEQ ID NO: 647 - DNA, 1134 bp, Arabidopsis thaliana
  misc_feature (1)..(1134): Ceres CDNA ID no. 23364445
  misc_feature (1)..(1134): Also Known As  Ceres SEEDLINE ME10853
attcttctcttgatctcttcttctttaacgtttatactttatatacatcgaaagcatttcttctttgtccgttcacatcattttcgaatttgtgttttccctagaaattgtctttttttttttctttcttatagagaaaatcaagaaaatgtaaaaaagattgatatatttatttattctcgttcaaatgaatcactctttatttgactcgttagtccatgtctcgtctcactctcttaatctctatttcctctcagatctctcaaaaagtgtagttttgtgacaaaaactgttttttaaagttagctataagaagatgaggaagatcatagggtttagaatcgggagacgagtctcaagatggatctttcgcaaaacccggatccaacgttcaggatacaaccggatacactcgacccagcaagcttgcatgctgatgagaccattagccaaactcaaaagttggggccaacgtctcaagcaaagtttcagacgcaggtctacgagaagatccgcatacatacccgttgatcataagaaagccgacccggttccaaggggacacttagctatctacgtgggtcaaaaagacggcgactgtcatagagttttggtacccatcgtttactttaaccatcctttgttcggtgagctgcttcgagaagccgaaaaagagtacggattttgccacgaaggaggtatcactattccttgtctgtattcagatttcgaacgggtcaagacccggatcgcatcggggtcaagttctcgggtatttccatggggccgtcattgccgcaattgaagacaattatggaaatagttcttaggattttcaagcttttattttctttgtagatattgttccctttcatttaccattttctaatcttgttactttttgtcactttacacttttcttgtgatagtctcaattatacagtaagctgataacgtaaataattattaagagtctaatagtgattatcgataatgatgtgattagcatggggacacttagtggtatactgtctttggacattgatataaagatgaaatggaaattggtgatgaaacaccaaaggaaaagtgtaacacgattctattctctatatgggtctactcaagattttt

SEQ ID NO: 648 - protein, 162 aa, Arabidopsis thaliana
  misc_feature (1)..(162): Ceres CDNA ID no. 23364445
  misc_feature (1)..(162): Also Known As  Ceres SEEDLINE ME10853
  misc_feature (37)..(146): Pfam Name: Auxin_inducible Pfam Description: Auxin responsive protein
  misc_feature: Phenotype: Late Flowering Useful for delaying flowering time
  misc_feature: Phenotype: Lanceolate Shaped Useful for making plants with increased biomass and foliage
MRKIIGFRIGRRVSRWIFRKTRIQRSGYNRIHSTQQACMLMRPLAKLKSWGQRLKQSFRRRSTRRSAYIPVDHKKADPVPRGHLAIYVGQKDGDCHRVLVPIVYFNHPLFGELLREAEKEYGFCHEGGITIPCLYSDFERVKTRIASGSSSRVFPWGRHCRN

SEQ ID NO: 649 - DNA, 516 bp, Populus balsamifera subsp. trichocarpa
  misc_feature (1)..(516): Ceres GDNA ANNOT ID no. 1497025
atgagaaagaatagaggtttcaagatcggcaaacggtttgtccggatctcaacttggatcttcagtcggacgcggatccacccaccgggttgcaactccataggcccatcagaatcaacatgcagttcgaagtcaaagtccttatcgaaaatcatcaattggggccgtcgtttaacaaaaggagctaaatcaatttgcagtgcaaaaccccggtcgggttatatacccgtgggtcatgaaccggtttgtgataaacctgttccagtaccaaaagggcatttggctgtttatgtgggtcaaaaagatggtgagtttcatagagttttggtgcctttgatttattttaatcaccctttgtttggtgaattattaagagaagcagaagaggaatatggttttaatcaacaaggtgggattaccattccttgccggttttcggagtttgagagggtccaaacccggattaaatcggggtcatgtggaaggaagctgacgtggaaacgtaaccaccattga

SEQ ID NO: 650 - protein, 171 aa, Populus balsamifera subsp. trichocarpa
  misc_feature (1)..(171): Ceres GDNA ANNOT ID no. 1497025
  misc_feature (1)..(171)
  Functional Homolog of CDNA ID no. 23364445at SEQ ID no. 648with e-value of 8.1E-43 and percent identity of 58.49
MRKNRGFKIGKRFVRISTWIFSRTRIHPPGCNSIGPSESTCSSKSKSLSKIINWGRRLTKGAKSICSAKPRSGYIPVGHEPVCDKPVPVPKGHLAVYVGQKDGEFHRVLVPLIYFNHPLFGELLREAEEEYGFNQQGGITIPCRFSEFERVQTRIKSGSCGRKLTWKRNHH

SEQ ID NO: 651 - protein, 168 aa, Glycine max
  misc_feature (1)..(168): Ceres CLONE ID no. 1659056
  misc_feature (1)..(168)
  Functional Homolog of CDNA ID no. 23364445at SEQ ID no. 648with e-value of 6.2E-36 and percent identity of 56.25
MQFRLGRRVVRVAKWVFGRVRIKTRPGYHHRLGSGSSHLRNPIIKLLTWGQKLKRGAKTLCGKKGSGYLPIGSDPACDRAPAVPKGHLAVYVGEEDGEFRRVLIPVIYFNHPLFSDLLREAEKKFGFEHPGGITIPCRLTEFERVKTRIASGSGQRGRTRRLGWRLHY

SEQ ID NO: 652 - DNA, 600 bp, Arabidopsis thaliana
  misc_feature (1)..(600): Ceres CDNA ID no. 23517836
  misc_feature (1)..(600): Also Known As  Ceres SEEDLINE ME10878
cttctaaatttcctcaaccaccaaccaccttctcaatgtcgtcctcctctacccaaaaccaattggagatgcgggattacacgtgtccggaatgtaacataggtcttagggttctctcattgccttccgcttctcctccatactgtcctctatgcaatgtcgcttcttacttcacttcttcgaccccttttgaagtaggtcctaatcctttcgaagacgatgaggaatctcagtttctcgatcccatggaatctcttccgaccattaagatctcatcttcaatgttgtcttccgcttcctcagacgattctgctttaccatgtgccatttgcagagaagatttcgtggttggagaatctgctaggagattgccatgcaaccatttataccataatgattgcattattccttggctcacaagtcataactcgtgccctctctgtcgagttgagctcccggttgcatctagtgaagacgatagtggtctggacatgtggtttgatgctttgaacctagaggacgacttggaggaagaagcgggagtcacgctcgatttggagcaaagtttagacggctaaaattctagctatagggtccatc

SEQ ID NO: 653 - protein, 180 aa, Arabidopsis thaliana
  misc_feature (1)..(180): Ceres CDNA ID no. 23517836
  misc_feature (1)..(180): Also Known As  Ceres SEEDLINE ME10878
  misc_feature (96)..(136): Pfam Name: zf-C3HC4 Pfam Description: Zinc finger, C3HC4 type (RING finger)
  misc_feature: Phenotype: Oval Shaped Useful for making plants with increased biomass and foliage
  misc_feature: Phenotype: Short Petioles Useful for making smaller plants
MSSSSTQNQLEMRDYTCPECNIGLRVLSLPSASPPYCPLCNVASYFTSSTPFEVGPNPFEDDEESQFLDPMESLPTIKISSSMLSSASSDDSALPCAICREDFVVGESARRLPCNHLYHNDCIIPWLTSHNSCPLCRVELPVASSEDDSGLDMWFDALNLEDDLEEEAGVTLDLEQSLDG

SEQ ID NO: 654 - DNA, 970 bp, Arabidopsis thaliana
  misc_feature (1)..(970): Ceres CDNA ID no. 23509199
  misc_feature (1)..(970): Also Known As  Ceres SEEDLINE ME10909
attttaagtctctaatctcatctttccattttcaagaagacttttaaatctgtctctctctctctctttgtaaatatacatatatagataagctcacatatatggcgactgaaacatcttctttgaagctcttcggtataaacctacttgaaacgacgtcggttcaaaaccagtcatcggaaccaagacccggatccggatcaggatccgagtcacgtaagtacgagtgtcaatactgttgtagagagtttgctaactctcaagctcttggtggtcaccaaaacgctcacaagaaagagcgtcagcttcttaaacgtgcacagatgttagctactcgtggtttgccacgtcatcataattttcaccctcataccaatccgcttctctccgccttcgcgccgctgcctcacctcctctctcagccgcatcctccgccgcatatgatgctctctccttcttcttcgagttctaagtggctttacggtgaacacatgtcgtcacaaaacgccgttgggtactttcatggtggaaggggactttacggaggtggcatggagtctatggccggagaagtaaagactcatggtggttctttgccggagatgaggaggttcgccggagatagtgatcggagtagcggaattaagttagagaatggtattgggctggacctccatttaagccttgggccatgaatgattataattttggcccagtaaagatctgtaaaatactactaggatttcatttttatagagtatgtttttttccttaatttcggttgaaattggtgaatatttttatctcttacttaccaaatctcatatttctatgtatgcgtttgctttcactttttttttttatataattcttcttgtaaaaaatgcaatgtgagttttcttccctatcattctgtcaagctttggttcaattatttagtaatcgaataatataggaatagtgttgaaag

SEQ ID NO: 655 - protein, 197 aa, Arabidopsis thaliana
  misc_feature (1)..(197): Ceres CDNA ID no. 23509199
  misc_feature (1)..(197): Also Known As  Ceres SEEDLINE ME10909
  misc_feature: Phenotype: Misc. Dwarf Useful for decreasing plant size
MATETSSLKLFGINLLETTSVQNQSSEPRPGSGSGSESRKYECQYCCREFANSQALGGHQNAHKKERQLLKRAQMLATRGLPRHHNFHPHTNPLLSAFAPLPHLLSQPHPPPHMMLSPSSSSSKWLYGEHMSSQNAVGYFHGGRGLYGGGMESMAGEVKTHGGSLPEMRRFAGDSDRSSGIKLENGIGLDLHLSLGP

SEQ ID NO: 656 - DNA, 570 bp, Populus balsamifera subsp. trichocarpa
  misc_feature (1)..(570): Ceres GDNA ANNOT ID no. 1471610
atggcagagagctcaaccccgttccaagaatctgaccataaggccacatcaaaactaaagcttttcggttttccattgactgagcaagatgaaatcctatcaaaaacagaaaatactttaggaaacaggaaattcgagtgccatttttgccaccgagcttttgccaactcacaagcactaggaggccatcaaaatgctcacaaaagagagcgccaaagagcaagacgtgcccaatacctttgtgaccgacgcctcacggcagctgcacaagttctttgctcacatgctgtcaaatcaccacccctcatttatccaaggggattgatcactagcaatagtaccgctgctgctgttgaatttaggccccaaatagcaagtgattacccatctcagcccttgttgtttccttcatctcctcctgatcatcactctccttctcaaatttatatcgcacatccattacatgatgcagatacgatgccatcttttattaaagttcctggtaaattatgttccaatgatgacgatgtaggggttgatctctgtctcaaactcactccctctggttag

SEQ ID NO: 657 - protein, 189 aa, Populus balsamifera subsp. trichocarpa
  misc_feature (1)..(189): Ceres GDNA ANNOT ID no. 1471610
  misc_feature (1)..(189)
  Functional Homolog of CDNA ID no. 23509199at SEQ ID no. 655with e-value of 6.2E-13 and percent identity of 58.57
MAESSTPFQESDHKATSKLKLFGFPLTEQDEILSKTENTLGNRKFECHFCHRAFANSQALGGHQNAHKRERQRARRAQYLCDRRLTAAAQVLCSHAVKSPPLIYPRGLITSNSTAAAVEFRPQIASDYPSQPLLFPSSPPDHHSPSQIYIAHPLHDADTMPSFIKVPGKLCSNDDDVGVDLCLKLTPSG

SEQ ID NO: 658 - protein, 267 aa, Oryza sativa subsp. japonica
  misc_feature (1)..(267): Public GI no. 34895596
  misc_feature (1)..(267)
  Functional Homolog of CDNA ID no. 23509199at SEQ ID no. 655with e-value of 8.8E-28 and percent identity of 41.62
MSMTSPRLKLFGFDVSEEETAEHEEQYSAEPESAPVCGGNGGGGGGGSDSSSSSTTTTTTATAGGDGRRYECQYCCREFANSQALGGHQNAHKKERQQLKRAQLQAAAAAAGRVAGGAAALYPRANPMVSAFAPTPHLLGGGEAGPTSWVYFSPRAAAVAGGAQGQQFHVSHGCVFPARGAGPAAVAAASPAVFSYTPATSAAAVAAASAPYVTTDEHHGRRIHASSAASLARYPGPAMVVAEPVATVPEDTCLGLDLQLSLAPAGL

SEQ ID NO: 659 - protein, 236 aa, Brassica napus
  misc_feature (1)..(236): Ceres CLONE ID no. 963612
  misc_feature (1)..(236)
  Functional Homolog of CDNA ID no. 23509199at SEQ ID no. 655with e-value of 8.9E-25 and percent identity of 45.88
  misc_feature (162)..(162): Xaa is any aa, unknown, or other
  misc_feature (173)..(173): Xaa is any aa, unknown, or other
  misc_feature (183)..(183): Xaa is any aa, unknown, or other
  misc_feature (184)..(184): Xaa is any aa, unknown, or other
  misc_feature (187)..(187): Xaa is any aa, unknown, or other
  misc_feature (194)..(194): Xaa is any aa, unknown, or other
  misc_feature (196)..(196): Xaa is any aa, unknown, or other
  misc_feature (203)..(203): Xaa is any aa, unknown, or other
  misc_feature (213)..(213): Xaa is any aa, unknown, or other
  misc_feature (218)..(218): Xaa is any aa, unknown, or other
  misc_feature (231)..(231): Xaa is any aa, unknown, or other
MEELNFRSKTSTSRLRLFGFSVDGEEDFFEQTVKPNQSSDSPEHNEFPAGSSGRSGGGVRSRGGGGGERKYECQYCCREFGNSQALGGHQNAHKKERQQLKRAQLQATRNAAAKYSNVGSASPLLRNPMVSAFAPRPHHLSSTVSPPGGGGSWMYLPRVSPXQLHVSHGCVVXDGAGAGTNGXXYEXGFGFNGXQXRHVQAHXPRPLVNGFSXEVGSXFDDGLGLDLHLSXAPAGH

SEQ ID NO: 660 - DNA, 789 bp, Populus balsamifera subsp. trichocarpa
  misc_feature (1)..(789): Ceres GDNA ANNOT ID no. 1449284
atggattttggttgtcatgcaaaatctaataccatctccagcaacaacacaaccctaaaactcttcggcttcgacatttcggagaacaacaaccctacagtgcctttagattcaagtaaatctccatctgggtcacaggaatcagagactaatttccaatcttccgaaggtagaaaatatgagtgtcaatactgttgtcgtgagtttgcgaactctcaagccttgggtggtcaccaaaacgctcacaagaaagaaagacggcttttgaaacgtgctcaaatgcaagccacccgcagcttggctgcagcttcatatgttaccataccaaattctatgttctcaacgttttcaccaccgccacctcacctccttgatccagcggtggttccgatggcggcggcgatgcaagaacatgcccattcctctccctggttttacacgtcctattcgggacgcatgccgcgtggcggcccgtatcttaatgggcctgcttcttttcacggaaggtgtctggacggaaagagtttggttggcagtgaggttgggcttcattctaaagtttttccgatgagtggattcactagagaagatgttgaccatcataagggattagcaagcaacctcctaggggctacggctcatgggatgatggttgagcagaagcaattttctgaaacggtgactaacaagggatggatcagatctactacgtacgattgtagggcaggagggggtgggggtggttcaggcatgataaataaggtaggatccttgaaacttgatgtataa

SEQ ID NO: 661 - protein, 262 aa, Populus balsamifera subsp. trichocarpa
  misc_feature (1)..(262): Ceres GDNA ANNOT ID no. 1449284
  misc_feature (1)..(262)
  Functional Homolog of CDNA ID no. 23509199at SEQ ID no. 655with e-value of 1.3E-26 and percent identity of 44.44
MDFGCHAKSNTISSNNTTLKLFGFDISENNNPTVPLDSSKSPSGSQESETNFQSSEGRKYECQYCCREFANSQALGGHQNAHKKERRLLKRAQMQATRSLAAASYVTIPNSMFSTFSPPPPHLLDPAVVPMAAAMQEHAHSSPWFYTSYSGRMPRGGPYLNGPASFHGRCLDGKSLVGSEVGLHSKVFPMSGFTREDVDHHKGLASNLLGATAHGMMVEQKQFSETVTNKGWIRSTTYDCRAGGGGGGSGMINKVGSLKLDV

SEQ ID NO: 662 - protein, 240 aa, Glycine max
  misc_feature (1)..(240): Ceres CLONE ID no. 1060169
  misc_feature (1)..(240)
  Functional Homolog of CDNA ID no. 23509199at SEQ ID no. 655with e-value of 1.8E-13 and percent identity of 41.96
MAAPHGTVLGGADSFSQLPLVRVAAQQPADSTIRLFGCDFSNDAVAAGDQLPKADAAAAAGEGETRKFECHYCCRNFPTSQALGGHQNAHKRERQHARRAHLEASLAAAYLPAGAHVYGALFGGYGHHQAAPMPPPQYPVWPGMYGSVARSAAYGGMTVPGMVWRPTPVGADAFGAAGRHDEATAAVAGTGEVPGKGGHNAVMSVVATLPSCLTGGSPTEIGRSEMMGQKEGVVSLDLCL

SEQ ID NO: 663 - protein, 211 aa, Zea mays
  misc_feature (1)..(211): Ceres CLONE ID no. 1688030
  misc_feature (1)..(211)
  Functional Homolog of CDNA ID no. 23509199at SEQ ID no. 655with e-value of 4.9E-20 and percent identity of 41.57
MHRSMAADIKCEQPKRTPSPSASSLRIFGYDVAGTGIADHIIEPPPQDDGRPAVVGSRRRFECQYCCREFANSQALGGHQNAHKKERQQLKRERQFAARALVGGPAAAGLGGICAAGFTSSQSQPPPGHIIAVSPGAIASWVYLANQPAATMGLPFHAGVCQPEPLMLRGGTGSSILRRSYELCAPADDDLEESSAMGLDLHLSLAPASSS

SEQ ID NO: 664 - protein, 288 aa, Sorghum bicolor
  misc_feature (1)..(288): Public GI no. 18390109
  misc_feature (1)..(288)
  Functional Homolog of CDNA ID no. 23509199at SEQ ID no. 655with e-value of 6.1E-12 and percent identity of 30.46
MAAAPHDMHGVDSFAQLPFIPRGAAPARAAAPKTTPAPASSRVDAASIRLFGRDFPNDDQQQAATAHQLLLLKEDAVAAVGDGEETAAASAGGGERRFECHYCCRNFPTSQALGGHQNAHKRERQHARRAHLEASFAAHCGAYLPGAHLYGLFGYGGHTALPPPPHYTAATAAAVWAAGAVPGMCGGVGPVARPPVYGGVAVPGMWRPSRTPPGAGSGGGFVAAGRPVGADPAAGYGEMIMAGNDDKVAMSVVTSLPPLPSPSCLSGGQQSAEMIGRPELGHKDGVIS

SEQ ID NO: 665 - DNA, 1030 bp, Arabidopsis thaliana
  misc_feature (1)..(1030): Ceres CDNA ID no. 12667412
  misc_feature (1)..(1030): Also Known As  Ceres SEEDLINE ME10937
ttgcgtttccacatttgtttaaacataactctctctctctctctctctctctctctctctcagtacctcttattcttatgctcttcttcaccaatcctatctcttctatctgtctttattttctctacatgtgaattgacccatttctggtaaacacatagagtaccacttttcttatttagattcttcttcctcttcatagcttccaagtcaactacttcagcttctgtcggctgtctcttcccagatctcgttaagaccaaaacttggaataaatgacggaatctgatgatgcctcacgagaaacaccagccagcagaggaggagaagcctcgtcaaatcaagatctgtccaaaccagaatcaaaccatgtttcactcgatctcaagctcaacgatactttcaacgatgacacaaagagcacaaagtgtgaagcaaacccaagagtcttctcttgcaactactgcagacgcaagttctatagctctcaagctcttggaggtcaccagaacgcacacaagcgagaaagaacaatggccaaacgagcaatgcacatgggaagaatgtttggtcaccatcacaggccttacacatacacttcttcttcccttgggatgcaagctcactccggtttacttcatcacaccttatctcagcctcagcctcttgtttctaggtttcatcatcaagggtattttggtaacaccgtgccgttgttctttgactatgacgatggtggtagcgacttcttctggcccggcagcttccgtcaggtggttgaggaagctgaggctccggtggttgtggtggctagtactgagtcaggccttgatttgaactcggttgcggcaaatggaggtgtagataataatagctcaaagcctgatcttaccttaagactctaaaaggattaaggagattatatctttattgttatttttctattgttagacatacagaagataagttggagacagttgatagaaattgatgaaaaactttgttgttatattaaatgaggttgttcatt

SEQ ID NO: 666 - protein, 209 aa, Arabidopsis thaliana
  misc_feature (1)..(209): Ceres CDNA ID no. 12667412
  misc_feature (1)..(209): Also Known As  Ceres SEEDLINE ME10937
  misc_feature: Phenotype: INFLORESCENCE Useful for making ornamental plants with modified flowers
  misc_feature: Phenotype: Reduced Apical Dominance Useful for modifying plant structure, ie increased branching
MTESDDASRETPASRGGEASSNQDLSKPESNHVSLDLKLNDTFNDDTKSTKCEANPRVFSCNYCRRKFYSSQALGGHQNAHKRERTMAKRAMHMGRMFGHHHRPYTYTSSSLGMQAHSGLLHHTLSQPQPLVSRFHHQGYFGNTVPLFFDYDDGGSDFFWPGSFRQVVEEAEAPVVVVASTESGLDLNSVAANGGVDNNSSKPDLTLRL

SEQ ID NO: 667 - DNA, 777 bp, Populus balsamifera subsp. trichocarpa
  misc_feature (1)..(777): Ceres GDNA ANNOT ID no. 1445379
atgaaacctattattgatcttgaagttgaggcatcatcagaaaatgtttctgatgttagcagccaagtggcttccaacttatcaaaccaagaaacttctgcaggtccctccaatgaaagcctcactaactcttcttatctcaaaaatgccatagcaactcaatccggttcagaaacggtttctcttgacttaaaactttgcttcaatgatgatgagttagggggaagggactcgatgggactctcattgtcaagcacaagcgaaagtagcaacgatcctgcatcgcgcactacagctgaagcaataccacgagttttttcttgcaattactgtcagcgcaaattcttcagctctcaggcacttggtggacaccaaaatgctcacaagagagaaaggacattagcaaagcgtgcaataagaatgggtattttctcggaaaggtatgccagcctagcatctttgcctctgcatggatcctcatttcgatctctgggaatcaaggcacattcttcagttcaccaaagttttgcacaaccagtaaggccacaagacataagtagcagtgcaagatttgatcatggatacgtgggtctgccaatatttatggaggatgaagaggcagagttggtatggccaggtagttttcgacaggtagctgtggcagatgacgctcatcaaagttttgtacttgcacgaagctcaaacatgaattttttgggggcaactccatcggtgaactcggacgattctgccccagatctcactctaaaactttaa

SEQ ID NO: 668 - protein, 180 aa, Populus balsamifera subsp. trichocarpa
  misc_feature (1)..(180): Ceres GDNA ANNOT ID no. 1445379
  misc_feature (1)..(180)
  Functional Homolog of CDNA ID no. 12667412at SEQ ID no. 666with e-value of 1.6E-30 and percent identity of 52.17
MGLSLSSTSESSNDPASRTTAEAIPRVFSCNYCQRKFFSSQALGGHQNAHKRERTLAKRAIRMGIFSERYASLASLPLHGSSFRSLGIKAHSSVHQSFAQPVRPQDISSSARFDHGYVGLPIFMEDEEAELVWPGSFRQVAVADDAHQSFVLARSSNMNFLGATPSVNSDDSAPDLTLKL

SEQ ID NO: 669 - protein, 257 aa, Glycine max
  misc_feature (1)..(257): Ceres CLONE ID no. 1044811
  misc_feature (1)..(257)
  Functional Homolog of CDNA ID no. 12667412at SEQ ID no. 666with e-value of 9E-34 and percent identity of 50.62
MKPNFDLEVEACAAYESEVSSQVASNVSIQETSIGPCSDSLTNISNITNPIGIHPNSDAISLDLSLNFKNSAPGGRDSIGFSFSSTSESSNEPASQTTAATIPRVFSCNYCQRKFFSSQALGGHQNAHKRERTLAKRAMRMGFFSERYANLASLPLHGSFRSLGIKAHSSLHHGFSPTMRRPEIKNNARFDQGYVGHPIFLEDDESDLLWPGSFRQVAEAGDSHQNFILTGSSNLSFTEVNPPVDIDNSTPDLTLKL

SEQ ID NO: 670 - protein, 257 aa, Glycine max; identical to SEQ ID NO: 669
  misc_feature (1)..(257): Ceres CLONE ID no. 522952
  misc_feature (1)..(257)
  Functional Homolog of CDNA ID no. 12667412at SEQ ID no. 666with e-value of 4.7E-34 and percent identity of 48.02

SEQ ID NO: 671 - protein, 257 aa, Glycine max
  misc_feature (1)..(257): Ceres CLONE ID no. 479801
  misc_feature (1)..(257)
  Functional Homolog of CDNA ID no. 12667412at SEQ ID no. 666with e-value of 4.7E-34 and percent identity of 47.52
MKPNFDLEVEACAEYESEVSSQVASNVSIQETSIGPCSDSLTNISNITNPIGIHPNSDAISLDLSLNFKNSEPGGRDSIGFSFSSTSESSNEPASQTTAATIPRVFSCNYCQRKFFSSQALGGHQNAHKRERTLAKRAMRMGFFSERYANLASLPLHGSFRSLGIKAHSSLHHGFLPTMRPPEIKSNARYDQGYLGHPIFLEDDESDLLWPGSFRQVAEAGDSHQNFILTGSSNMSFTEVNPPVDIENSTPDLTLKL

SEQ ID NO: 672 - DNA, 777 bp, Populus balsamifera subsp. trichocarpa
  misc_feature (1)..(777): Ceres GDNA ANNOT ID no. 1449468
atgaaaccaattattgatcttgaagttgaagccacctcagaaaatgtttctgaagttagcagccaagtagcttccaacttatcaaaccaagaaacttctgcagccccctccaatgacagcctcactaactattcctatctcacaaatgccatagcaactcaatctggttcggaaatggtttcccttgacttaaccctttgcttcaataatgatgagttaggtggaagggacccagtgggactctcattgtcaagcacaagtgagagtagcaatgaacctgcatcacgtactacagctgaagcaataccacgagtattttcttgcaattactgtcagcgcaaattcttcagctctcaggcacttggtggacaccaaaacgctcataagagagagagaacattagctaagcgtgcaataagaatgggtattttctcggaaaggtatgccagcctagcatcgttgcctctacatggatcctcattccgatccctagggatagaggcacattcttcagtgcaccaaaactttgcaccaccagtaaggtcactagaaataagcagcagtgcaagatttgatcaaggttatgcaggtctgccagtattcatggaggatgatgaggcagagttgttatggccaggtagttttcgacaggtagctgtggcagacgatgctcatcaaagttttgtagtcgcaggaagttcaaacatgatttttttgggggcaactccaccagtgaacttagatgattctgcgccagatctcacactaaaactttga

SEQ ID NO: 673 - protein, 200 aa, Populus balsamifera subsp. trichocarpa
  misc_feature (1)..(200): Ceres GDNA ANNOT ID no. 1449468
  misc_feature (1)..(200)
  Functional Homolog of CDNA ID no. 12667412at SEQ ID no. 666with e-value of 5.5E-28 and percent identity of 48.59
MVSLDLTLCFNNDELGGRDPVGLSLSSTSESSNEPASRTTAEAIPRVFSCNYCQRKFFSSQALGGHQNAHKRERTLAKRAIRMGIFSERYASLASLPLHGSSFRSLGIEAHSSVHQNFAPPVRSLEISSSARFDQGYAGLPVFMEDDEAELLWPGSFRQVAVADDAHQSFVVAGSSNMIFLGATPPVNLDDSAPDLTLKL

SEQ ID NO: 674 - DNA, 573 bp, Populus balsamifera subsp. trichocarpa
  misc_feature (1)..(573): Ceres GDNA ANNOT ID no. 1461090
atgatcttccaggaagaagcgatcgaaataaaaaccagcaagcaccaaaatgaaatagtgggcaaccacaacagcaatgaaggttataatgataacaatccaggagagtggctgaatctgagactaggtggaaattcaccctcaacagcaggagattatgactcgcaatcaagacctacttctagcaaggttttctcatgtaacttctgtagaaggaagttcttcagttcacaggcacttgggggtcatcagaacgcccacaagagagagaggggtgcggccagaagataccactcccagaggatgatgacaatgatgggcttgcctatcaattccccaatggctagatcacttggggtcaggccccatgcccttgtgcacaagccaaccagagatggaactcctattggagggagatttaatgaagccaatccaggatttgttatgtcatggatgcccttcgcacttgatgatacagcggatttgacatggccaggcagttttcgcttggattcacagctaccagagacatcatcggagtcgctcaagcttgacttgaacctccgactctaa

SEQ ID NO: 675 - protein, 190 aa, Populus balsamifera subsp. trichocarpa
  misc_feature (1)..(190): Ceres GDNA ANNOT ID no. 1461090
  misc_feature (1)..(190)
  Functional Homolog of CDNA ID no. 12667412at SEQ ID no. 666with e-value of 2.4E-18 and percent identity of 47.73
MIFQEEAIEIKTSKHQNEIVGNHNSNEGYNDNNPGEWLNLRLGGNSPSTAGDYDSQSRPTSSKVFSCNFCRRKFFSSQALGGHQNAHKRERGAARRYHSQRMMTMMGLPINSPMARSLGVRPHALVHKPTRDGTPIGGRFNEANPGFVMSWMPFALDDTADLTWPGSFRLDSQLPETSSESLKLDLNLRL

SEQ ID NO: 676 - protein, 207 aa, Zea mays
  misc_feature (1)..(207): Ceres CLONE ID no. 276476
  misc_feature (1)..(207)
  Functional Homolog of CDNA ID no. 12667412at SEQ ID no. 666with e-value of 2.3E-18 and percent identity of 30.39
MMCQEQCDELSETEISSQEASNSSGPVSLDLSLSVTDNSNGNNSNSGGAQADAAREPSRVFTCNYCQRKFFSSQALGGHQNAHRRERTLARRALRLDAAGPYYGYGYGYYADVASLPLYGSCLYPIGIQAHASAAALPEHEDARAGADELRRPARGLLSPMPFLVADDEEMLFGWPGSFRPDAAAPADSAGGVAVHAREEPDLTLRL

SEQ ID NO: 677 - DNA, 1031 bp, Arabidopsis thaliana
  misc_feature (1)..(1031): Ceres CDNA ID no. 12385780
  misc_feature (1)..(1031): Also Known As  Ceres SEEDLINE ME10971
  misc_feature (1)..(1031): Also Known As  Ceres CLONE ID no. 97505
atacttcactactcccacataaataaacacaaaaaaaacactcaccttaacttcttctactgcatagaaaaatcttacatatgatggatagaggagaatgcttgatgtcgatgaagcttagaccgatggtgacgaggccatcttcggatgggactttattttggccgtttagggaagagagagcgtttgcgtcagctgaggagtatggcggcggaggtggttgcatgtggccaccgaggtcttactcatgcagcttttgcgggagagagttcaagtcggcgcaagcactaggcggtcatatgaacgttcatcgaagagaccgagctcgactcaaacaacaatcattatcaccttcatcaactgaccaagccacacctcctgaatgtgatcgtcaacaacaagttcttgatgtgggatcaaaggttcttgttcaagaagaaacaagaaagcctaacggaaccaagagggagataagtgatgtttgtaataacaacgttttagaaagttctatgaaaagatatgaacatgacaatggtgaagtcaagactgacttatcggtcggtctactgagtactgagtttgatcctcggaagaagcaactaatcaacggatcatcttcgtcatggaagagggcaaagacggatgtgtcaagatttccaatgatgttagggttggtcattggaatttccgagatcaacggccatcatgaggagttggatcttgagctaaggctaggagctgatccgcctaaggttaactagcttaagtaattaaaaagtaataatagttaatgtgattgccaaaaagaagaagttaaactgtctctaatctcaagagtgaaaagtgagtaggttctgtagtgttggctttgatatagtaatatatttatcttatggataaagtcaacacgtatagtctttgctctaattcataagacaattaaaatattttgattgtttctttttcttacgaatgatgtaactttctcacgatttggttttcaatatttatgcctattcgaaagatttttg

SEQ ID NO: 678 - protein, 226 aa, Arabidopsis thaliana
  misc_feature (1)..(226): Ceres CDNA ID no. 12385780
  misc_feature (1)..(226): Also Known As  Ceres SEEDLINE ME10971
  misc_feature (1)..(226): Also Known As  Ceres CLONE ID no. 97505
  misc_feature (55)..(77): Pfam Name: zf-C2H2 Pfam Description: Zinc finger, C2H2 type
  misc_feature: Phenotype: Late Flowering Useful for delaying flowering time
  misc_feature: Phenotype: ROSETTE LEAVES Useful for making ornamental plants with modified leaves
  misc_feature: Phenotype: Cup-shaped Useful for making plants with altered leaf shape e.g., curled leaves
  misc_feature: Phenotype: Oval Shaped Useful for making plants with increased biomass and foliage
MMDRGECLMSMKLRPMVTRPSSDGTLFWPFREERAFASAEEYGGGGGCMWPPRSYSCSFCGREFKSAQALGGHMNVHRRDRARLKQQSLSPSSTDQATPPECDRQQQVLDVGSKVLVQEETRKPNGTKREISDVCNNNVLESSMKRYEHDNGEVKTDLSVGLLSTEFDPRKKQLINGSSSSWKRAKTDVSRFPMMLGLVIGISEINGHHEELDLELRLGADPPKVN

SEQ ID NO: 679 - DNA, 873 bp, Populus balsamifera subsp. trichocarpa
  misc_feature (1)..(873): Ceres GDNA ANNOT ID no. 1464833
atggaacaagctcaatactggctgtggatgaagaggaaacaactcttgaagtcacagctgccagcatcaatgaaatccatcagtggttcgtgggaagagaaagcttttgcagaagattcatctgggcatcttggtggatgcatctggccgccaagatcttattcttgcagtttttgtagcagagaattcaggtcagctcaagccctaggtggtcacatgaatgttcataggagggatagggctaggcttaagcaatctcttagtcctcataattatgtttttcaacatcaaaatcatatccaaagttcacttaaaccattagggtctcatttcccatctgatcaggtttgtaccttagataattatgatcttgaccccaaactttctgtctctagagccactaatattgcatcaactctgtccaatcaagaaaatttaagtgaacatgcctttgtttctcccccttcttcttccttcgttcaagaacagcataaagggtatccttatctccatgataatttatcaggctcagatcattctttgtcagctagacttcattcaaaacctgaagcagaaaggaatcaaggtgaagtgaaggttacatgcttgaaccatgataagtttgttgcgactgacttatttatggacctgggttctgttattaatagccacggtttattatcacctggttcttgtggtgatgaggcaatcagttgcaaaaggcctagaaccaatgtttcagttctctcactgttggttaagccacgtccaaatgatagatacattcttcaatcagaggcaaccggacctacttctagctccaaggagggcatagatcttgaactcaggcttggtgagacaccaaaaaagtga

SEQ ID NO: 680 - protein, 267 aa, Populus balsamifera subsp. trichocarpa
  misc_feature (1)..(267): Ceres GDNA ANNOT ID no. 1464833
  misc_feature (1)..(267)
  Functional Homolog of CDNA ID no. 12385780at SEQ ID no. 678with e-value of 9E-24 and percent identity of 82.76
MKSISGSWEEKAFAEDSSGHLGGCIWPPRSYSCSFCSREFRSAQALGGHMNVHRRDRARLKQSLSPHNYVFQHQNHIQSSLKPLGSHFPSDQVCTLDNYDLDPKLSVSRATNIASTLSNQENLSEHAFVSPPSSSFVQEQHKGYPYLHDNLSGSDHSLSARLHSKPEAERNQGEVKVTCLNHDKFVATDLFMDLGSVINSHGLLSPGSCGDEAISCKRPRTNVSVLSLLVKPRPNDRYILQSEATGPTSSSKEGIDLELRLGETPKK

SEQ ID NO: 681 - protein, 214 aa, Arabidopsis thaliana
  misc_feature (1)..(214): Public GI no. 4567313
  misc_feature (1)..(214)
  Functional Homolog of CDNA ID no. 12385780at SEQ ID no. 678with e-value of 1.2E-17 and percent identity of 29.11
MKRTHLASFSNRDKTQEEEGEDGNGDNRVIMNHYKNYEAGLIPWPPKNYTCSFCRREFRSAQALGGHMNVHRRDRAKLRQIPSWLFEPHHHTPIANPNPNFSSSSSSSTTTAHLEPSLTNQRSKTTPFPSARFDLLDSTTSYGGLMMDREKNKSNVCSREIKKSAIDACHSVRCEISRGDLMNKKDDQVMGLELGMSLRNPNQVLDLELRLGYL

SEQ ID NO: 682 - DNA, 591 bp, Populus balsamifera subsp. trichocarpa
  misc_feature (1)..(591): Ceres GDNA ANNOT ID no. 1452647
atggtcaagaaatttccacagggaagcagcacggttaaagacaaatgggagaagaacaacgcgatctttcaaggagagcattcaagcgttttttcatggcctcaaagaaactactcatgcagcttttgcaagagacaattcatctctgctcaagcacttgggggccatatgaacgttcacaggagagatagagccaagctgagacagctaccttcttggttttttaaatgtccaaagtaccctactactaatccgaaccccgatcatttactttcttcgtcttctaagttcttgccgtaccctgatgatcgcactcatgatcattcttcatacctgagttctttctcttcaccttgttgccgagaaaagaaatccgtagttgaatgtcatgaaagtaaagatttaacaaagaagaagaacaatgcaggagctgtgttcggggttggagaattgaagaaaaatttcgcacaagaatgtgatcaacttgaagttttgaggagaaatgagattattaacttggacatggaaatggggtgcgaagatccgaaggaggttttggatttggagcttcgacttggccttttagtataa

SEQ ID NO: 683 - protein, 196 aa, Populus balsamifera subsp. trichocarpa
  misc_feature (1)..(196): Ceres GDNA ANNOT ID no. 1452647
  misc_feature (1)..(196)
  Functional Homolog of CDNA ID no. 12385780at SEQ ID no. 678with e-value of 5.2E-15 and percent identity of 81.08
MVKKFPQGSSTVKDKWEKNNAIFQGEHSSVFSWPQRNYSCSFCKRQFISAQALGGHMNVHRRDRAKLRQLPSWFFKCPKYPTTNPNPDHLLSSSSKFLPYPDDRTHDHSSYLSSFSSPCCREKKSVVECHESKDLTKKKNNAGAVFGVGELKKNFAQECDQLEVLRRNEIINLDMEMGCEDPKEVLDLELRLGLLV

SEQ ID NO: 684 - DNA, 915 bp, Populus balsamifera subsp. trichocarpa
  misc_feature (1)..(915): Ceres GDNA ANNOT ID no. 1458150
atggagcaagctcaatactggttgtggatgaagaggaaacaacttctgatgtcacagcttgaagcagcaacggactccaattccaaatgttcgttagaagagaaagcttttgcagaagatgcatctgggcatcttggtggttgcatatggcctccaagatcttattcttgcagtttttgtaaaagagaattcaggtcagctcaagccctaggtggtcacatgaatgttcataggagggatagggctaggcttaagcaatctcttactcttagtcctcataaagatgtttttcgacatcagaatcatatccaaaggtcacttaaatcactgggatctcatttcccaactgaggtttgcaacttagataattatgatcttgaccctaaactttctgtctctggaactattaatatcgcatcaactctttccacttctaggttttcagctttgtccactcatgaaaatttaagtgatcatgcctttgtttctcccttttcttcttacttcgaacaagaacagcataaagggtatcctcatttccataataatttatcagggtcggatcattctttggcagttagacttctgaatgattcagaatcaaaacctgaagcagaaaagaatcagggtaaattagattctacatgctcgagacatgacaatttcgttgcaactgatttatttatgggcttgagttctgctcctaatagccagagtttatcatctcctgattcttgtggtaacgaggcaatcagttgcaaagggcctacaaccaatgtttcagtgctctcgctgttggttaagccacgttcaaattatggatgtactcaatcagaggcaatcggaccgatgtctagctccatggaggacatagatcttgagctccggctcggtgagccaccaaaggtgaagtag

SEQ ID NO: 685 - protein, 295 aa, Populus balsamifera subsp. trichocarpa
  misc_feature (1)..(295): Ceres GDNA ANNOT ID no. 1458150
  misc_feature (1)..(295)
  Functional Homolog of CDNA ID no. 12385780at SEQ ID no. 678with e-value of 3.6E-26 and percent identity of 79.66
MKRKQLLMSQLEAATDSNSKCSLEEKAFAEDASGHLGGCIWPPRSYSCSFCKREFRSAQALGGHMNVHRRDRARLKQSLTLSPHKDVFRHQNHIQRSLKSLGSHFPTEVCNLDNYDLDPKLSVSGTINIASTLSTSRFSALSTHENLSDHAFVSPFSSYFEQEQHKGYPHFHNNLSGSDHSLAVRLLNDSESKPEAEKNQGKLDSTCSRHDNFVATDLFMGLSSAPNSQSLSSPDSCGNEAISCKGPTTNVSVLSLLVKPRSNYGCTQSEAIGPMSSSMEDIDLELRLGEPPKVK

SEQ ID NO: 686 - protein, 287 aa, Oryza sativa subsp. japonica
  misc_feature (1)..(287): Public GI no. 50933653
  misc_feature (1)..(287)
  Functional Homolog of CDNA ID no. 12385780at SEQ ID no. 678with e-value of 6.5E-22 and percent identity of 36.36
MDAAAMERMAKHYWALWGAGVRSGWPAAAHGGGAEPSWEEKAFAQDAAGHLGGCVWPPRSYTCSFCRREFRSAQALGGHMNVHRRDRARLRQCDDDDDDPIPPTVSICAPPPPPPPPPPLLPAAAAAPDSPSPPSLLLQISSPKSTTADHHQNHQQLQLQGTNSSPNSCIATIIKESRNKARLFITTMPAPAPATTHDLGLGGGKDDDDSISISMEEIRRKRRRVDQPLTPTPSYSSERERRREDDPAAADASNNKVIPSSSILVNQLAMDMVGRQEIDLELRLGST

SEQ ID NO: 687 - protein, 307 aa, Zea mays
  misc_feature (1)..(307): Ceres CLONE ID no. 375181
  misc_feature (1)..(307)
  Functional Homolog of CDNA ID no. 12385780at SEQ ID no. 678with e-value of 2.7E-21 and percent identity of 31.11
MDQIGKYWGMWGARRSSSSSSTIPISAWAAAYGGSSEPSWEEQAFARDAAEHLGGCVWPPRSYSCTFCQREFRSAQALGGHMNVHRRDRALLRLGGSSSPEDVHATTNDQPHPQQGALLYRAAASNPSTTTPSTTAAAGTTAAGPAAAITIAGAGDGDANTTTTTTYLSRIIKESKNKRFMPMPDHSVAGMREDQAAAIDDHRHNEDGDSWRSASAAKKRRRLDHPLATAAALLIFVQPAPKAATNVAACESQGGADHETKVPHTTTLTSPSSSSPLLLDQRHELDLELRLGTTPKVTYIHGNDTRS

SEQ ID NO: 688 - protein, 288 aa, Zea mays
  misc_feature (1)..(288): Ceres CLONE ID no. 393033
  misc_feature (1)..(288)
  Functional Homolog of CDNA ID no. 12385780at SEQ ID no. 678with e-value of 4.8E-25 and percent identity of 36.65
MLGAATTTTRAGTGSSLIRSTWPPPAAHGGGRSGEPSWEELAFAQDAAGQLGGCVWPPRSYTCTFCRREFRSAQALGGHMNVHRRDRARLRQCAPPDHDQEPIAAPLPAPELADHQQQLLQLHGSPMTKAAVLFSGRPAAACCTHQQTYCNNNREGEGEDSPARYISTTTTIIKESKSKVLISIPAATTAAGSKKAATTIAIIGEEEEEEEEEEEIMVTGRRTKRRRLVHQPFYDLRRLPPASSSPNKGGVEDDDAKVPKLSSPISLSHHLAGRQEEVDLELRLGTSC

SEQ ID NO: 689 - protein, 313 aa, Glycine max
  misc_feature (1)..(313): Ceres CLONE ID no. 666751
  misc_feature (1)..(313)
  Functional Homolog of CDNA ID no. 12385780at SEQ ID no. 678with e-value of 3.3E-24 and percent identity of 34.23
  misc_feature (187)..(187): Xaa is any aa, unknown, or other
MEQGQCWTKRKKYSLSSSTGSPTNPSYGDSWEEQAFAEDAANSLGGCIWPPRSYSCSFCRREFRSAQALGGHMNVHRRDRARLKQQPTSPHNEILCHDLETQLHKPVQSPFASLGGYLYPSPLCGLACKKTNPNCDPDFVASPSSSPSPSKALLAPSANIGTFREETMIPLYDSSILHKISPASNSXESWPNSAEDHRLYSCKFHPQADTTKPSKGIMDFRCRGNKGNNDDIDGDINFNSVVYRTHPSLQFESTKEPDHISCKKRKTDASSTLFSPKSSSVDRHQVQPKMFEFSPSSMEELDLELRLGNRSKI

SEQ ID NO: 690 - DNA, 720 bp, Arabidopsis thaliana
  misc_feature (1)..(720): Ceres CDNA ID no. 23494432
  misc_feature (1)..(720): Also Known As  Ceres SEEDLINE ME10984
atgaagcaaccaaagccgattctgaaatacgtcttagtctctatcttcctcactctccctctcatcctgttcttctctatacaactacgtacacccgaaaaagaactcatcaggatccgaccaggttacacgtcttacgattactacatccaacgacagctcaacaaaacgcttaaccctaggtttcgtacgatatggatgacacgagactgggaccgtaagatcaaagtgttctcaagattcttccaagatctgaaacgtcaaggcctcttatccaaagactctaaatgtctctgcctcggagctcgagtcgggcaagaagtggaggccctgaaacgtgtaggcgtaaacgactcggtgggaatggatctggtgccatatccgccgttggtggtcaaaggtgactttcatcaccagccgttcgatgatgagacttttgattttgaattctccaacgtgtttgatcatgcactttatccggacaagtttgttggagagatcgaacggacactgagacctggaggtttatgtgttttacacgtggctctctctacacgatcggataagtattcagccaatgatctcttcagtgtggaggcattggtgaaactattccgacaatcggaggtggttcatgtaagaaatgtggacggctttgggttggatacagaggtcgtgtttaggaagaaaagggattcatccatcctagttcggtcttga

SEQ ID NO: 691 - protein, 173 aa, Arabidopsis thaliana
  misc_feature (1)..(173): Ceres CDNA ID no. 23494432
  misc_feature (1)..(173): Also Known As  Ceres SEEDLINE ME10984
  misc_feature: Phenotype: Dark Green Useful for increasing chlorophyll and photosynthetic capacity
MTRDWDRKIKVFSRFFQDLKRQGLLSKDSKCLCLGARVGQEVEALKRVGVNDSVGMDLVPYPPLVVKGDFHHQPFDDETFDFEFSNVFDHALYPDKFVGEIERTLRPGGLCVLHVALSTRSDKYSANDLFSVEALVKLFRQSEVVHVRNVDGFGLDTEVVFRKKRDSSILVRS

SEQ ID NO: 692 - DNA, 735 bp, Arabidopsis thaliana
  misc_feature (1)..(735): Ceres CDNA ID no. 23518705
  misc_feature (1)..(735): Ceres CDNA ID no. 12724333
  misc_feature (1)..(735): Also Known As  Ceres SEEDLINE ME10988
atggaggagctggattttagttcaaaaacaacaacttctcgtctaaagctatttggatttagtgttgatggagaagaagatttctccgatcaatcagtcaaaactaacctatcttctgtatcaccggaacgtggcgagtttccggcaggatcttccggaagaagtggcggtggtgtacgaagccgaggcggaggaggaggaggaggagaacgtaagtatgagtgtcagtattgttgtagagagtttggtaactcacaagccttaggtggtcaccaaaacgctcacaagaaagagcgtcaacagcttaaacgtgctcagcttcaagctacacgaaacgcagccgcaaatttctcaaacgctggatcagcgtctcagtttttaaggaatcctatagtctctgcttttgctcctccgcctcatcttttatcatcatccgccgtgcctcagcctatgggaggtccttggatgtatcttccacgtgtttctccatctcaacttcacgtgtctcatggctgcgtcatccaagatggttcgggtggtgcgggtgctggtgggttctcgtacgagtatggggctcgtgattcagggtttggagtagttggggctcagatgagacatgttcaggcccatgggccgagaccatcggttaatgggttttcaagagaagtaggaactacttttgatgatggtttagggttggatttgcatctcagtcttgcacctgctggtcattga

SEQ ID NO: 693 - protein, 244 aa, Arabidopsis thaliana
  misc_feature (1)..(244): Ceres CDNA ID no. 23518705
  misc_feature (1)..(244): Also Known As  Ceres SEEDLINE ME10988
  misc_feature: Phenotype: Late Flowering Useful for delaying flowering time
  misc_feature: Phenotype: Dark Green Useful for increasing chlorophyll and photosynthetic capacity
  misc_feature: Phenotype: Oval Shaped Useful for making plants with increased biomass and foliage
  misc_feature: Phenotype: Short Petioles Useful for making smaller plants
MEELDFSSKTTTSRLKLFGFSVDGEEDFSDQSVKTNLSSVSPERGEFPAGSSGRSGGGVRSRGGGGGGGERKYECQYCCREFGNSQALGGHQNAHKKERQQLKRAQLQATRNAAANFSNAGSASQFLRNPIVSAFAPPPHLLSSSAVPQPMGGPWMYLPRVSPSQLHVSHGCVIQDGSGGAGAGGFSYEYGARDSGFGVVGAQMRHVQAHGPRPSVNGFSREVGTTFDDGLGLDLHLSLAPAGH

SEQ ID NO: 694 - protein, 236 aa, Brassica napus; identical to SEQ ID NO: 659
  misc_feature (1)..(236): Ceres CLONE ID no. 963612
  misc_feature (162)..(162): Xaa is any aa, unknown, or other
  misc_feature (173)..(173): Xaa is any aa, unknown, or other
  misc_feature (183)..(183): Xaa is any aa, unknown, or other
  misc_feature (184)..(184): Xaa is any aa, unknown, or other
  misc_feature (187)..(187): Xaa is any aa, unknown, or other
  misc_feature (194)..(194): Xaa is any aa, unknown, or other
  misc_feature (196)..(196): Xaa is any aa, unknown, or other
  misc_feature (203)..(203): Xaa is any aa, unknown, or other
  misc_feature (213)..(213): Xaa is any aa, unknown, or other
  misc_feature (218)..(218): Xaa is any aa, unknown, or other
  misc_feature (231)..(231): Xaa is any aa, unknown, or other

SEQ ID NO: 695 - protein, 267 aa, Oryza sativa subsp. japonica; identical to SEQ ID NO: 658
  misc_feature (1)..(267): Public GI no. 34895596

SEQ ID NO: 696 - protein, 211 aa, Zea mays; identical to SEQ ID NO: 663
  misc_feature (1)..(211): Ceres CLONE ID no. 1688030

SEQ ID NO: 697 - protein, 288 aa, Sorghum bicolor; identical to SEQ ID NO: 664
  misc_feature (1)..(288): Public GI no. 18390109

SEQ ID NO: 698 - DNA, 860 bp, Arabidopsis thaliana
  misc_feature (1)..(860): Ceres CDNA ID no. 23521525
  misc_feature (1)..(860): Also Known As  Ceres SEEDLINE ME11028
gtttcttaatagacttcagtgatggagaccaagcacctacgcaagcttctccagctctaccaagcttgtggtggcgaacaagagctcacaaaaaccgtccaaaacgtcacatcatcaccattgactccaacgccaccaccacagccaccttcggcattagactccactatggctctcaccatctttatcctcttggttgctctcttcttcatgggtttcttttcagtttacttccgccacttcgcagacagttcaagttcaacggttgatatttcttccatgccaagaacaagatcctctaggatgtctccacgtcgcctttccacatccgtcgtcgtatcacggccgtatagtttccggaggggtcttgattctcaggccgttcgatctctgccagtgtaccgttacacgaaagcagcgaagcagcggaacgaagattgcgttatctgcttgagcgatttcgaagaaggtgaaacagttaaagtgataccacattgtggtcacgtgttccacgtagattgcgttgacacgtggctgagctcatacgtaacatgtcccttgtgccggagtaaccagctgttctcggataaggacttgggcatgcaagaaccgcctgatcaggactcggcagaagaacatgacacgtgtgatggtgtggacacttgtgtaaggaggtgtagtagctgttcaagtttggggcagaggactggattggaacgatcgctgagcctctgacatgttcttttttttttgtgttgttcttaatcttgattttgtctttgtattattgttgtaataagggaagggtatgaaataatgactttgtaaaatgagattgagtagtaaattttgttagtgtt

SEQ ID NO: 699 - protein, 237 aa, Arabidopsis thaliana
  misc_feature (1)..(237): Ceres CDNA ID no. 23521525
  misc_feature (1)..(237): Also Known As  Ceres SEEDLINE ME11028
  misc_feature (140)..(181): Pfam Name: zf-C3HC4 Pfam Description: Zinc finger, C3HC4 type (RING finger)
  misc_feature: Phenotype: Dark Green Useful for increasing chlorophyll and photosynthetic capacity
  misc_feature: Phenotype: Oval Shaped Useful for making plants with increased biomass and foliage
METKHLRKLLQLYQACGGEQELTKTVQNVTSSPLTPTPPPQPPSALDSTMALTIFILLVALFFMGFFSVYFRHFADSSSSTVDISSMPRTRSSRMSPRRLSTSVVVSRPYSFRRGLDSQAVRSLPVYRYTKAAKQRNEDCVICLSDFEEGETVKVIPHCGHVFHVDCVDTWLSSYVTCPLCRSNQLFSDKDLGMQEPPDQDSAEEHDTCDGVDTCVRRCSSCSSLGQRTGLERSLSL

SEQ ID NO: 700 - DNA, 750 bp, Populus balsamifera subsp. trichocarpa
  misc_feature (1)..(750): Ceres GDNA ANNOT ID no. 1491996
atgaagccccacaaccgcaaactacaagtaccatacaacgatgcaccgttcgaacaccccatcactcccactttccaaacctctaactccaccataccaccgccaccgttcaaagaaccaaccaccataccaccgccaacaacaactttacagctacaacagcaacaacagttttattcacgcacagggtttgaaccgtctgtagccttaataattctatttctcttaatagctctcttcttcatgggattcttttctatctacacccgtaagttctccgtcaacccatcaccgtcgtcgtcacaacgcagcacgggcacaccagggccagcaagtacatccagccgtccatccagggcttctaccagctcacgaattactcgaggtcttgacccacaagttgtcaactcactgccggtgtactcttattaccatggtgatgtgaagtaccagattgagtgtgctatttgcttgggtgagtttgaggagaaagaggctgttaagatgataccaaaatgtcatcacgtgtttcatttgcagtgtattgacacgtggcttgagatgcacgtgacttgtcctgtttgtcgaggggctcagttcgttcaggagaagggcggcggtaacgatggtttgggtgtgattcaggagagggttgatcaaggtgcgagtcaaccagaggcaagatcagaggttgggaatggtgacacgtcattggaggtgaggggagaagtaataggtgttcaagcctag

SEQ ID NO: 701 - protein, 168 aa, Populus balsamifera subsp. trichocarpa
  misc_feature (1)..(168): Ceres GDNA ANNOT ID no. 1491996
  misc_feature (1)..(168)
  Functional Homolog of CDNA ID no. 23521525at SEQ ID no. 699with e-value of 4E-25 and percent identity of 50.37
MGFFSIYTRKFSVNPSPSSSQRSTGTPGPASTSSRPSRASTSSRITRGLDPQVVNSLPVYSYYHGDVKYQIECAICLGEFEEKEAVKMIPKCHHVFHLQCIDTWLEMHVTCPVCRGAQFVQEKGGGNDGLGVIQERVDQGASQPEARSEVGNGDTSLEVRGEVIGVQA

SEQ ID NO: 702 - DNA, 795 bp, Populus balsamifera subsp. trichocarpa
  misc_feature (1)..(795): Ceres GDNA ANNOT ID no. 1439136
atgaagccccacaaccgcaaactacaagtaccatacaacgatgcaccgttcgaacaccccatcactcccactttccaaacctctaactccaccataccaccgccaccgttcaaagaaccaaccaccataccaccgccaacaacaactttacagctacaacagcaacaacagttttattcacgcacagggtttgaaccgtctgtagccttaataattctatttctcttaatagctctcttcttcatgggattcttttctatctacacccgtaagttctccgtcaacccatcaccgtcgtcgtcgtcgtcgtcgtcgtcgtcgtcagaggatttctataattctcacagacaacgcagcacgggcacaccagggccagcaagtacatccagccgtccatccagggcttctaccagctcacgaattactcgaggtcttgacccacaagttgtcaactcactgccggtgtactcttattaccatggtgatgtgaagtaccagattgagtgtgctatttgcttgggtgagtttgaggagaaagaggctgttaagatgataccaaaatgtcatcacgtgtttcatttgcagtgtattgacacgtggcttgagatgcacgtgacttgtcctgtttgtcgaggggctcagttcgttcaggagaagggcggcggtaacgatggtttgggtgtgattcaggagagggttgatcaaggtgcgagtcaaccagaggcaagatcagaggttgggaatggtgacacgtcattggaggtgaggggagaagtaataggtgttcaagcctag

SEQ ID NO: 703 - protein, 183 aa, Populus balsamifera subsp. trichocarpa
  misc_feature (1)..(183): Ceres GDNA ANNOT ID no. 1439136
  misc_feature (1)..(183)
  Functional Homolog of CDNA ID no. 23521525at SEQ ID no. 699with e-value of 2.2E-24 and percent identity of 50.00
MGFFSIYTRKFSVNPSPSSSSSSSSSSEDFYNSHRQRSTGTPGPASTSSRPSRASTSSRITRGLDPQVVNSLPVYSYYHGDVKYQIECAICLGEFEEKEAVKMIPKCHHVFHLQCIDTWLEMHVTCPVCRGAQFVQEKGGGNDGLGVIQERVDQGASQPEARSEVGNGDTSLEVRGEVIGVQA

SEQ ID NO: 704 - protein, 293 aa, Populus x canescens
  misc_feature (1)..(293): Public GI no. 57117314
  misc_feature (1)..(293)
  Functional Homolog of CDNA ID no. 23521525at SEQ ID no. 699with e-value of 3.6E-16 and percent identity of 25.96
MDPDSRDPPIEYREGYALSGKIMLSAILILFFVIIVMVLLHLYARWYLTRARQRQVRRVRNRRTHLVFYVDSPQNPNNVTSHVTRGLEETVKNSLPVFVYPRKTHQDSIECAVCLSEFEENERGRVLPKCNHSFHTECIDMWFHSHSTCPLCRSPVEPVAENPVPEGSNFGISEAGSGLCTSCQHEEDHLGSASTSSFNGGRKPVGLIGVTIDVPRRNGNFEDESNTESPSASHSFRSPMSRMLSFKRMLSRERRGTVSPTVANSVSCGGGSGTTEFDIEQGRDESMPQQTRC

SEQ ID NO: 705 - protein, 375 aa, Glycine max
  misc_feature (1)..(375): Ceres CLONE ID no. 647103
  misc_feature (1)..(375)
  Functional Homolog of CDNA ID no. 23521525at SEQ ID no. 699with e-value of 5.7E-23 and percent identity of 34.43
MKKHIHIALFLLLVSPLIPIAVAQAQSQPNDFSDANLNQFSPSIAIIIVILVAALFLMAFFSIYVRHCADSPSTTVSPLTTARSRRAARGLDPAVIQTFPILEYSEVKIHKIGKEALECAVCLCEFEDTETLRLIPKCDHVFHPECIDEWLGSHTTCPVCRANLVPTDSEDAIANGNANGVVPVPETFTRDIEAQNDAVEAAPEQQNAEADPVLPEPEVVSLDKTLNRNRTRGSRSNRPRRFPRSHSTGHSLVQPGENTDRFTLRLPLEVRKQLINRQLQRASSLIVLPREGSLRQGYRTGGEGSSRGKISRRLDRSLKSDRWIFSMAAPFFARALSIRSPRVRNNDVEGTASSSSSSTAPILPPTAVDSARPLV

SEQ ID NO: 706 - protein, 177 aa, Triticum aestivum
  misc_feature (1)..(177): Ceres CLONE ID no. 819214
  misc_feature (1)..(177)
  Functional Homolog of CDNA ID no. 23521525at SEQ ID no. 699with e-value of 3.4E-25 and percent identity of 30.88
MAIVIVVLIAAFFFLGFFSVYIRHCYGDSPYSATTLPLGAAAARSRRQQRGLDPAVLETFPTMAYADVKEHKAVKGALECAVCLSEFDDDETLRLLPKCSHVFHPDCIDTWLASHVTCPVCRANLVPDGDADAPAAGDQPAELSSVHPAPQPQELPAPEAEAAHAVVIDVEESEDER

SEQ ID NO: 707 - protein, 366 aa, Glycine max
  misc_feature (1)..(366): Ceres CLONE ID no. 708708
  misc_feature (1)..(366)
  Functional Homolog of CDNA ID no. 23521525at SEQ ID no. 699with e-value of 5E-15 and percent identity of 33.33
MKTVLFLLLVSALIPIAVAQPNDFSDANLNEFNSSIAIIIIILVIAFFLMAFFSIYVRHCADSPSNTVRPLTTARSRRAARGLDPALIQTFPILEYSVVKIHKIGKEALECAVCLCEFEDTETLRLLPKCDHVFHPECIDEWLSSHTTCPVCRANLLPTESEDAIANANANGVVPVPETLTRDIESQNDAVQAAPEQQNAEADPVLPEPEVVSLDKTLNRNRTRGSRSNRPRRFPRSHSTGHSLVQPGENTDRFTLKLPLEVRKQLINRQLQRASSLIVLPREGSSRQGYRTGGEGSSRAKISRRLDRSLKSDRWIFSMAAPFFARALSIRSPRVRNNDVEGAASSSSPTAPIMPPTAVDSARPPV

SEQ ID NO: 708 - protein, 379 aa, Cucumis melo
  misc_feature (1)..(379): Public GI no. 28558782
  misc_feature (1)..(379)
  Functional Homolog of CDNA ID no. 23521525at SEQ ID no. 699with e-value of 1.5E-24 and percent identity of 35.05
MPSLTAPHGLPLFLFLLLFLFSSVSAQFQPAPDPRSDPYQYRLSGSMAVIIVILIAALFFMAFFSVYIRHCNDSPSNTVRPITAAAGRSRRATRGLDPAVIETFPTLIYSDVKEHKIGKSALECAVCLNEFEDDETLRLIPKCDHVFHPECIDAWLASHSTCPVCRANLSPQPTDSVHRADDSNAVVNSDTDGGDIEAQSNDVVSETTAPPTVQIQTESELSTTTSNKALNRTRTRGSRSNRLRWLFPRSHSTGHSLVQPGEDTERFTLRLPVEIRKQVVNRKLHRATSMVVLARQSSSMRGYRFGSGEGSSRGKYYRRLERLDRTSKSDRWVLSMTPPFFTRMSSMKTPRGGSNRAEPGSGRELGQGNTAVDSSRLPV

SEQ ID NO: 709 - protein, 295 aa, Medicago sativa
  misc_feature (1)..(295): Public GI no. 23451086
  misc_feature (1)..(295)
  Functional Homolog of CDNA ID no. 23521525at SEQ ID no. 699with e-value of 2.3E-17 and percent identity of 16.03
MGNTNSSHNLLITVTVFAVTVTVFFILYFILRRRRFSPSSSSTVRVSPVTPTSSTSSSVVDSLPIFTFSSIKRRSSTVVSGDCAVCLSKFEQNDLLRLLPLCCHAFHTECIDAWLASNQTCPLCRSSVFVSESEIMKIFRSSSTSSGNNSFRLEIGNISHRREATATDNNNNNNNVAGETDRRTYSVGAFDYFVDEEAEIPVGNTNRRIFSGEKDDAAVLSVEVETPVDSQASLIGEGNWLKDYVDGLTRVMSFRGSGSSRRNDVVAGVGDFDVEANGNGFGEEISEMFRWISGV

SEQ ID NO: 710 - protein, 188 aa, Brassica napus
  misc_feature (1)..(188): Ceres CLONE ID no. 957229
  misc_feature (1)..(188)
  Functional Homolog of CDNA ID no. 23521525at SEQ ID no. 699with e-value of 5.8E-17 and percent identity of 29.19
  misc_feature (184)..(184): Xaa is any aa, unknown, or other
  misc_feature (186)..(186): Xaa is any aa, unknown, or other
MARLLFRLLQETNSPTPATPSPALYSDLVVVIAALLCALICVLGLLAVSRCVWLRRIANRSATNSDQPPANKGLKKKVLKSLPKLTYSPDSPPAEKFAECAICLMEFAAGDELRVLSQCGHGFHVSCIDTWLGSHSSCPSCRQILVGIARCQKCGGLPGSSSSGPEPDTRIKQDDPNSNNNDNXSXLN

SEQ ID NO: 711 - protein, 392 aa, Oryza sativa subsp. japonica
  misc_feature (1)..(392): Public GI no. 50900320
  misc_feature (1)..(392)
  Functional Homolog of CDNA ID no. 23521525at SEQ ID no. 699with e-value of 2.7E-23 and percent identity of 32.26
MAPARVHSNGRLLMLLLLLAVAGFAAAQPSQDNPPAGYYATNFSPSMAIVIVVLIAAFFFLGFFSIYVRHCYGGRGDYSTTPLPRSGAARSRRQRGLDQSVLATFPTMAYADVKAHKSVKGALECAVCISEFDDDETLRLLPKCSHVFHQDCIDTWLASHATCPVCRANLVDGASEPASDVAAELPTAPAPRPEGATPSEAAAPGGEAPAAAAAAAVVIDVEETEEERIIREEAAELTRIGSLKRALRSKSGRAPAARFPRSHSTGHSLSSSAAASAGAERFTLRLPEHVLREVIAAGQLQRTTSLVAFRAGRQGSTRRGLRSGGGGGGGEGSSRAGRSVRLGQSGRWPSFLPRTFSARLPAWGSRSTRRGDGDGSSKGGRTAGSGAGAGGK

SEQ ID NO: 712 - protein, 182 aa, Parthenium argentatum
  misc_feature (1)..(182): Ceres CLONE ID no. 1603708
  misc_feature (1)..(182)
  Functional Homolog of CDNA ID no. 23521525at SEQ ID no. 699with e-value of 8.8E-18 and percent identity of 31.67
MLSMSSDPSINRQWPDAELQDSSKSYAFSGRIMLASIIILIVVVVFLLILHLYARWYLLRLQLQRRNSRSRRTRSIRIIFYVDNNRPPSTTIGLDASVLKSLPLFVFSSETISDENIPECAVCLSEFEEGETGRVLPKCKHSFHTECIDMWFHSNSTCPLCRAPVEAVETTSLANSNVLEPS

SEQ ID NO: 713 - protein, 331 aa, Zea mays
  misc_feature (1)..(331): Ceres CLONE ID no. 398008
  misc_feature (1)..(331)
  Functional Homolog of CDNA ID no. 23521525at SEQ ID no. 699with e-value of 5E-21 and percent identity of 22.75
MVPQIPDPCEDDGQDHRCPPAAALPPPWPYPPLPPPASHGRSTFVTALIIATSVLVFLALCLSILVFVRRRRLRRRREALLEAALAPAAAATFPDEGDGDGGPGGEVVHHVWHIRTVGLDNAAIESIALTRYRAGGVLGASDCTVCLGEFQDGELLRLLPKCAHAFHVECIDTWLRAHVSCPLCRADVMDPGAAAADADAEQPPGTDAADASAERSASNTPTTELERLDQQANEHHQELRVQIDQPDHSSSMELERRRRQVRHHGARAQNFRRVASMDSRSPPPVSAEVDPEGEPAGGEEQGTCGAVCCEVSPEPAELKRSWSASSRWTLL

SEQ ID NO: 714 - DNA, 1018 bp, Arabidopsis thaliana
  misc_feature (1)..(1018): Ceres CDNA ID no. 13576188
  misc_feature (1)..(1018): Also Known As  Ceres SEEDLINE ME11039
  misc_feature (1)..(1018): Also Known As  Ceres CLONE ID no. 1153827
gaacttcactctctatcttcccctgacgtgactcttctctctcttcctctccatcaatggcgaccacaaactctctccaccaccaccaccactcctctccttcttacacacaccaccgcaacaatctccattgccaatctcacttcggaccaacttctctttccctcaaacaacccacttccgccgcaacattctcactaatctgctctgcttcttccacctcctcctccaccaccgccgtatctgccgtttcaaccacaaacgcctccgccacaactgccgaaaccgcgaccatattcgacgttctggagaaccatctcgtcaatcaaaacttcagacaagccgacgaggagacacggagattactcattcagatatccggagaagccgccgtgaaacgtggctacgttttcttctccgaggtgaaaacaatctcccccgaagatcttcaagctatcgacaatctatggattaaacacagtgatggtagattcggatacagcgtgcaacgcaaaatctggttaaaagtgaagaaagatttcacaagattcttcgttaaagttgagtggatgaagcttcttgacacagaggttgttcaatacaattacagagcgtttcctgacgaattcaagtgggagcttaacgatgaaacgcctttaggacacttaccgctcacaaacgccttgagaggaacgcagcttctgaaatgcgttttaagccatcctgcgtttgcgacagctgatgataacagtggagaaacagaagacgagcttaacagaggtgttgcggtggctaaggaacaggcaggagtaggagcagacaaaagagtgtttaaaacaaattacagcttctgatgtctttctccttcttttttttttttttttaatattgattttctgatattgtgaaagtataaacaaatctctgtaatcatatcattaattaaatcggatttctcttcaatgtcagttccattgtgattatggatgtatgaacaaagccagatcattagttaatg

SEQ ID NO: 715 - protein, 265 aa, Arabidopsis thaliana
  misc_feature (1)..(265): Ceres CDNA ID no. 13576188
  misc_feature (1)..(265): Also Known As  Ceres SEEDLINE ME11039
  misc_feature (1)..(265): Also Known As  Ceres CLONE ID no. 1153827
  misc_feature (84)..(227): Pfam Name: GUN4 Pfam Description: GUN4-like
  misc_feature: Phenotype: Yellow-Green Viable 3 Useful for making lethal plants for genetic confinement systems
MATTNSLHHHHHSSPSYTHHRNNLHCQSHFGPTSLSLKQPTSAATFSLICSASSTSSSTTAVSAVSTTNASATTAETATIFDVLENHLVNQNFRQADEETRRLLIQISGEAAVKRGYVFFSEVKTISPEDLQAIDNLWIKHSDGRFGYSVQRKIWLKVKKDFTRFFVKVEWMKLLDTEVVQYNYRAFPDEFKWELNDETPLGHLPLTNALRGTQLLKCVLSHPAFATADDNSGETEDELNRGVAVAKEQAGVGADKRVFKTNYSF

SEQ ID NO: 716 - protein, 256 aa, Zea mays
  misc_feature (1)..(256): Ceres CLONE ID no. 1404062
  misc_feature (1)..(256)
  Functional Homolog of CDNA ID no. 13576188at SEQ ID no. 715with e-value of 5.9E-100 and percent identity of 79.22
MATTNSLQHHHHSSSSYHRHNLHPQSHVVPSSLSLKHPSSTATFSSLICSSSSSSVVSAALTTNASSVTAETSTEFDVLATHLTNQDFRKADEETRRLLIQIAGEAAVKRGYVFFSEVKSISVQDLQAIDNLWTKHSDGRFGYSVQRKLWLKVKKDFTRFFIKVEWMKLLDTEVVQYNYRAFPDEFQWELNDETPLGHLPLTNALRGTQLLKCVLSHPAFEIDGDDIEEAGEAENRGVGGKAKTKDTTVFKTDYSF

SEQ ID NO: 717 - DNA, 792 bp, Populus balsamifera subsp. trichocarpa
  misc_feature (1)..(792): Ceres GDNA ANNOT ID no. 1541512
atggctaccagctctttacggtccctcaaccaccatcactccctcctcaagttccatccctcagacaccacccctccctcctcactcttcctcaagcctaccacctccatctccgtcaacaccgacacttctctctccctctctatctcctccccaacaatcaccaccgcttactccgtctcccccacgacctccactactccctccacttccaaaaccgactcccttgacctcctccagcaacatctctcgaaccaaaacttccgcgaagccgatgaagaaacccgcagacttctcattgttctagctggtgaagcagcacaaacgcgtggctatgtcttcttctctgaggtccagtttatctcagaggaagaccttaaagacattgacgaactatggaaaaatcacagcaacaacaagtttggatacagtgttcagaaaagaatatggcaactgaaggctaacaaagacttcaccaagttcttcatcaaagttgggtggatgaagaagcttgacactgaggttcagcaatacaactatagggcttttcctaatgagttcgtttgggatcttaatgatggtactcctgaaggtcacttgcctttgacaaatgcactcagagggacacaattgctcaaaaacatccttaaccatcctgcttttgaggtagatattgcagaaggggagggagataaagttgaaggtaatgaaaatggtgggctaaagggattaagggatagctcaaagcttccattaagcaagagagtattgaagacagattacagcttttga

SEQ ID NO: 718 - protein, 263 aa, Populus balsamifera subsp. trichocarpa
  misc_feature (1)..(263): Ceres GDNA ANNOT ID no. 1541512
  misc_feature (1)..(263)
  Functional Homolog of CDNA ID no. 13576188at SEQ ID no. 715with e-value of 1.2E-64 and percent identity of 57.26
MATSSLRSLNHHHSLLKFHPSDTTPPSSLFLKPTTSISVNTDTSLSLSISSPTITTAYSVSPTTSTTPSTSKTDSLDLLQQHLSNQNFREADEETRRLLIVLAGEAAQTRGYVFFSEVQFISEEDLKDIDELWKNHSNNKFGYSVQKRIWQLKANKDFTKFFIKVGWMKKLDTEVQQYNYRAFPNEFVWDLNDGTPEGHLPLTNALRGTQLLKNILNHPAFEVDIAEGEGDKVEGNENGGLKGLRDSSKLPLSKRVLKTDYSF

SEQ ID NO: 719 - protein, 264 aa, Glycine max
  misc_feature (1)..(264): Ceres CLONE ID no. 715530
  misc_feature (1)..(264)
  Functional Homolog of CDNA ID no. 13576188at SEQ ID no. 715with e-value of 3.4E-65 and percent identity of 52.85
MATNSLHYSIQHHHHSLTKRHHPSDTPPHTSLFLKHPTPPIHPNITISHTPSNSHITYSLSQTTSSSTTSPTTPSFDLLRHHLSNKNFELADEETRRLLIVLAGEAAQKRGYVFFSEVKFISEGGLRAIDSLWREYSGGKFGYSVQKKLLEKANGDFTKFFIKVGWMKKLDTEMEQYNYRSFPTEFIWELNDDTPEGHLPLTNALRGTQLLNNVLKHPAFDVVDDKEEKEKDGENKENGGAISATGLKDNGSSSKRIFKTDYSF

SEQ ID NO: 720 - DNA, 786 bp, Populus balsamifera subsp. trichocarpa
  misc_feature (1)..(786): Ceres GDNA ANNOT ID no. 1455981
atggcggccaccaactctctacagtccctccatcaccatcactccctcctcaagttcctcccctcggacacctccccgccctcctccctcttcctcaagcccaccacctccatctccactgccactaacatttctctctccctctctatttcaacaaccaccactgcctactccatctcccccgccacctccactgctccctccacttccaagaccttctccctcaacctcctccagcaacacctctccaaccaaaacttccgcgaagccgatgaggaaacccgcaggctgctcatagttctagctggtgaggcagcacagaaacgtggctatgtcttcttctctgaagtccagttcataccagaacaagaccttaaagacattgatgaactgtggaaaaagtacagcaacaacaaatttggatacagtgttcaaaagagaatatggcgacaaaagggtaacaaggacttcaccaaatttttcatcaaagttgggtggatgaagaagcttgataccgaggttgagcaatacaactataggtcttttcctaatgagttcatttgggagcttaatgatgatactcctgaaggtcacttgcctctgacaaatgcacttagaggcatacagttgctcaaaaacattcttagccatcctgcttttgaggtagatggagaagtggaggaagataaggttgaaggcaatgaaaatggagggctaaagggactgagggatagctcaaagcctccattaagcaacagagtatttaaaacagattacagcttctga

SEQ ID NO: 721 - protein, 261 aa, Populus balsamifera subsp. trichocarpa
  misc_feature (1)..(261): Ceres GDNA ANNOT ID no. 1455981
  misc_feature (1)..(261)
  Functional Homolog of CDNA ID no. 13576188at SEQ ID no. 715with e-value of 5.8E-65 and percent identity of 55.64
MAATNSLQSLHHHHSLLKFLPSDTSPPSSLFLKPTTSISTATNISLSLSISTTTTAYSISPATSTAPSTSKTFSLNLLQQHLSNQNFREADEETRRLLIVLAGEAAQKRGYVFFSEVQFIPEQDLKDIDELWKKYSNNKFGYSVQKRIWRQKGNKDFTKFFIKVGWMKKLDTEVEQYNYRSFPNEFIWELNDDTPEGHLPLTNALRGIQLLKNILSHPAFEVDGEVEEDKVEGNENGGLKGLRDSSKPPLSNRVFKTDYSF

SEQ ID NO: 722 - protein, 273 aa, Oryza sativa subsp. japonica
  misc_feature (1)..(273): Public GI no. 62734221
  misc_feature (1)..(273)
  Functional Homolog of CDNA ID no. 13576188at SEQ ID no. 715with e-value of 1.5E-56 and percent identity of 54.80
MANASLQSFLLHHHHSFLSNGIHEGSSPSIILKLTTNSNSSISFKLFSNTTSSSSSSVTTTASTPNSPVTPAPVTASSPPPPSLELLGAQLAERDYRQADETTRALLIELAGEPARRRGYVFFSEVQFISADDLRAIDALWQEHSGGRFGYSVQRRLWEKSRRDFTRFFIRVGWMKKLDTEVEQFNYRAFPDEFIWELNDDTPEGHLPLTNALRGTQLLGNIFTHPAFEEEQEDELAAEENDTPDNTGQSKDGSKGKERPKFMRDFFKPDYSF

SEQ ID NO: 723 - protein, 273 aa, Triticum aestivum
  misc_feature (1)..(273): Ceres CLONE ID no. 772319
  misc_feature (1)..(273)
  Functional Homolog of CDNA ID no. 13576188at SEQ ID no. 715with e-value of 6E-59 and percent identity of 47.73
MANASLQSFLPQHHHSFLNSNTHDGSPPALLKLTTNSTNASNSISFKLFASSSSSVTTTANSPAPTPVAAAAAATTSPPTPSLELLGQQLAAGDYRQADETTRALLIVLAGEAARRRGYVFFSEVQFISVEDLRAVDALWLEHSGGRFGYSVQRRVWDKSLREFTRFFIKIGWMKKLDTEVEQFNYRAFPDEFIWELTDDTPEGHLPLTNALRGTRLLENIFTHPAFDCEEDEAAGADEEADKGSATGQNNKDDNKGRGRPKSLTDFKPDYSF

SEQ ID NO: 724 - protein, 271 aa, Zea mays
  misc_feature (1)..(271): Ceres CLONE ID no. 224054
  misc_feature (1)..(271)
  Functional Homolog of CDNA ID no. 13576188at SEQ ID no. 715with e-value of 5E-55 and percent identity of 47.73
  misc_feature (212)..(212): Xaa is any aa, unknown, or other
MANASLQSFLLPHDHSFAGAGGSRDGSASAVHKLSTNTSGSISFRLYTKTSPSVTAASATNSSAPTPVAPASAPAAGDEEEEEGPSLDLLRRQLAAGDYRQADETTRALIIDLAGEPARRRGYVFFSEVQFIPAEDLAAIDGLWKEHSGGRFGYSVQRRLWEKSRRDFTRFFIRVGWMRKLDTEVEQYNYRAFPDEFMWELTDDTPEGHLPXTNALRGTQLLANILTHPAFQEEDQGDGAAAAEESANTKDDNKGRERPRSMRDFKPDYSF

SEQ ID NO: 725 - DNA, 708 bp, Arabidopsis thaliana
  misc_feature (1)..(708): Ceres CDNA ID no. 36767038
  misc_feature (1)..(708): Ceres CDNA ID no. 12695887
  misc_feature (1)..(708): Also Known As  Ceres SEEDLINE ME11055
atgagtaatccgaacccagagaaaacgaaagtggatgttactgaggaagagaaagaggaatctgatgagcaatggagcgatgaagaaaccaatatgagagaaattgttctcggcctccctgctttgaatatcagcagtagaatatttggagagagtagtagtgtcgttgaggaagatgcagaaaaagcgcgtttgaatgagcaagcggttcttgcggcggggttgattttggctgcggcagaggaagcggttatgaaaggaatgaatgagggaagtgggagtggtgggaagaaaaagagtagaccaaggatatctacgcaaaccgatgacgaaggggatggtttgggtgaaggagaagcgaaaaagccgaagaagaaagcaaaggaattgactcatccaccgaaaggaccaccggtttgtcatatctgtggaagaggtttcggttcgtggaaggcagtgtttgggcatatgagggctcatagagatagaaactatcaagggtttcttcctcctcctacattctctgcgggggctgaaagtggtggtggtgatgcgccaggatctgaaggtgggagaggttcaggtattgatttgaatgtggaacctgtggagcaagtagaggaagcgactgaatctggatgtattgccaagttcgatcttaataaatctccaccaaaagatgaagaggaagaggacaaacccaagtga

SEQ ID NO: 726 - protein, 235 aa, Arabidopsis thaliana
  misc_feature (1)..(235): Ceres CDNA ID no. 36767038
  misc_feature (1)..(235): Also Known As  Ceres SEEDLINE ME11055
  misc_feature: Phenotype: Dark Green Useful for increasing chlorophyll and photosynthetic capacity
  misc_feature: Phenotype: Seedling Lethal Useful for making lethal plants for genetic confinement systems
  misc_feature: Phenotype: Cup-shaped Useful for making plants with altered leaf shape e.g., curled leaves
MSNPNPEKTKVDVTEEEKEESDEQWSDEETNMREIVLGLPALNISSRIFGESSSVVEEDAEKARLNEQAVLAAGLILAAAEEAVMKGMNEGSGSGGKKKSRPRISTQTDDEGDGLGEGEAKKPKKKAKELTHPPKGPPVCHICGRGFGSWKAVFGHMRAHRDRNYQGFLPPPTFSAGAESGGGDAPGSEGGRGSGIDLNVEPVEQVEEATESGCIAKFDLNKSPPKDEEEEDKPK

SEQ ID NO: 727 - protein, 150 aa, Glycine max
  misc_feature (1)..(150): Ceres CLONE ID no. 1480956
  misc_feature (4)..(4): Xaa is any aa, unknown, or other
  misc_feature (6)..(6): Xaa is any aa, unknown, or other
  misc_feature (7)..(7): Xaa is any aa, unknown, or other
  misc_feature (9)..(9): Xaa is any aa, unknown, or other
  misc_feature (10)..(10): Xaa is any aa, unknown, or other
  misc_feature (12)..(12): Xaa is any aa, unknown, or other
MLDXLXXVXXAXGSKATVSAGEEEPAKKPKKKGSPKLINPPEGPPKCNVCGRSFLSRKAVFGHLRSHRDRGYSGFLPPPTFNAAVKASGGDVAASCGDGGLGLGTGGLNIDLNVDPIDEVEECGTGSTPKFDLNRSPPQDEEDAKEDKAE

SEQ ID NO: 728 - DNA, 1015 bp, Arabidopsis thaliana
  misc_feature (1)..(1015): Ceres CDNA ID no. 23360146
  misc_feature (1)..(1015): Also Known As  Ceres SEEDLINE ME11094
ctctgaaatcgaagtttctcgaactgttttgttttgttttttttccgatgaggtgtaagagacacacagtagatttcagtagcagtatcggcgtttgtgcttcttgtctccgtgaacgactctttactctcgccgtttcaaccgccgcgtctgaaaacgacgataacgatcatcgtcattctcgtatttctccacctcctctgctttttcctcgttctgtttctccttacgttgctcctagaaaatccgacgccggaaccggaaccggagctggaggaagagactccgtagcttcttctaataaccgattcttcgcaacgccgcaagtggttgttcaatcatcgtcatcggaaaaagtcttcgaatcagacagatcgtttaagaagaaaaaaagcggtttatctagattctctagcttcttcagaacgagatctgacgattacgattcgcgtcgcgattcatgcgacgcctccacggttttttctcaaccgtcgtcggcgacgacttcacggtcatggttttcgaaggttatatcagttcgatcgaagaaacaatcaaccaccaatacttgctacatcgaagatttgatcgcttccgaatccgatcatcatcatcataatcaaaatcgacctagacagagatattgtagaggaatgtcgccggcgggagattcaacgacgaacgatgaatcagttgaggaatctccagggagattaagaagaacgccggtgatgggaactccgggaaggaaaaagacggcgacgattgggattggtagaagtgtatcagggatggctttttgcttaagtccattagtgagagctaaacctaactgttcttctaactggaaagcgaaatttccgccggattttggatattccggtgaattgaaatctccggcgaagcctcacctatcaacggcggcgtctttttgcggtaaccggtctaagaagcttgtggatttaggtagagttgatcaccgccgttgatttttttggttgaggtcaaaatctga

SEQ ID NO: 729 - protein, 313 aa, Arabidopsis thaliana
  misc_feature (1)..(313): Ceres CDNA ID no. 23360146
  misc_feature (1)..(313): Also Known As  Ceres SEEDLINE ME11094
  misc_feature: Phenotype: Late Flowering Useful for delaying flowering time
  misc_feature: Phenotype: ROSETTE LEAVES Useful for making ornamental plants with modified leaves
  misc_feature: Phenotype: Oval Shaped Useful for making plants with increased biomass and foliage
  misc_feature: Phenotype: Short Petioles Useful for making smaller plants
MRCKRHTVDFSSSIGVCASCLRERLFTLAVSTAASENDDNDHRHSRISPPPLLFPRSVSPYVAPRKSDAGTGTGAGGRDSVASSNNRFFATPQVVVQSSSSEKVFESDRSFKKKKSGLSRFSSFFRTRSDDYDSRRDSCDASTVFSQPSSATTSRSWFSKVISVRSKKQSTTNTCYIEDLIASESDHHHHNQNRPRQRYCRGMSPAGDSTTNDESVEESPGRLRRTPVMGTPGRKKTATIGIGRSVSGMAFCLSPLVRAKPNCSSNWKAKFPPDFGYSGELKSPAKPHLSTAASFCGNRSKKLVDLGRVDHRR

SEQ ID NO: 730 - DNA, 996 bp, Populus balsamifera subsp. trichocarpa
  misc_feature (1)..(996): Ceres GDNA ANNOT ID no. 1443950
atgaggtgcaaaaaacacccgggcgacctcagcagcggcgtgggcgtatgcgcctcttgtctccgagaacgcttatttgcattaatcgccgctcaggctcaaatacagcagcagcagcaaatagcacaattcgcaaaggcacataaccatcaccattcacgcgccgctgcgatagtagatgaaagccgtaaatcagattctaactctcaatatctacaacaaccacctccacctctgatatttcctcgctctgtctctccttacgttgctcgccgtaaatccgacgactcctcctcctggtccaaccacaaccaccaccataacctccgtttctacagcactcctcagctgggccctgcctacaccaccccttcctcaaccacaacaaccgcggcgtacaagaagcaaagccaaaaattctcgcttttttctaatttattcaggtccagatccgacaaattcaaaacagactcgactggccgccgtgattctattgagccaccatcttcttcttcgccttcctggttctcgatggtcttctccggtcgtcggagaaagcaatcaaggcaattgcccatggaatattccggcacggttagcggagagcctcgccagaggttggatcgaggaatgtcgccagcgagaggtgcggattccgacaaggattgcgagaattgcgaccggtcaccgtcagggagcggctgctcgtcagagtcgtcgccggggtggaaaaagacaccagtagcgtcgggtgtgatgcggcgggggaaggcgggacaccctaggaacgtgtctggattggcgttttgtttgagtcctcttgtcagggcgagccctaaaccgaattggaaccagaagggaggattgccgcctgaattgggatattctggtgaggttagggctcctgtgaggccgcatctgtccaccgcggcgtcgttttgcgcgaaccgatcgaggaagcttgcggattttggtagggtcaatcataaccattga

SEQ ID NO: 731 - protein, 331 aa, Populus balsamifera subsp. trichocarpa
  misc_feature (1)..(331): Ceres GDNA ANNOT ID no. 1443950
  misc_feature (1)..(331)
  Functional Homolog of CDNA ID no. 23360146at SEQ ID no. 729with e-value of 1.9E-50 and percent identity of 50.52
MRCKKHPGDLSSGVGVCASCLRERLFALIAAQAQIQQQQQIAQFAKAHNHHHSRAAAIVDESRKSDSNSQYLQQPPPPLIFPRSVSPYVARRKSDDSSSWSNHNHHHNLRFYSTPQLGPAYTTPSSTTTTAAYKKQSQKFSLFSNLFRSRSDKFKTDSTGRRDSIEPPSSSSPSWFSMVFSGRRRKQSRQLPMEYSGTVSGEPRQRLDRGMSPARGADSDKDCENCDRSPSGSGCSSESSPGWKKTPVASGVMRRGKAGHPRNVSGLAFCLSPLVRASPKPNWNQKGGLPPELGYSGEVRAPVRPHLSTAASFCANRSRKLADFGRVNHNH

SEQ ID NO: 732 - DNA, 999 bp, Populus balsamifera subsp. trichocarpa
  misc_feature (1)..(999): Ceres GDNA ANNOT ID no. 1486315
atgaggtgcaataaacacccgtgcgacctcagctgcagcgtgggcgtatgcgcttcttgcctccgagaacgcttgtctgcattaatcgccgcccaggttcaaatacagcagcagcagcagcagcagatagcacaattagcaaaggcacatcataacccacgcgccgccacagtaatagacgaaagccgtaaatcagattctaattctcaacatcatcaacaacaacaacaacaacaacaacctcctcctctgatatttcccctctctgtttctccttacgtttctcgccgtaaatctgacgaccactcctcctggtacgcccacaaccaacaccacaacctccgtttctacagcactcctcaggtgggccctacctacaccaccacaacaaccgcagcgtataagaagcgaaacaaaaagttctcgcttttctccagtctattcaggtccagatccgacaagttcagtacacactctactagctatcgtgattccatagaagcatcatcgtcttcttccccttcttggttatcaacaatcttctccggtcgtcggagaaagcaatcaacgcaattatccatgggatactccggctcggttagtggaaagcctcgacagaggttagatcgaggaatgtcgccagcgagaggctcggtttctgaagaggattgtgagaattgcgatcggtcaccttcagggagcggcttctcgccggagtcttcgccagggtggaagaagacaccagtctctcaggcttccatgcggcgagggaaggcgggacacactaggaacgtgtctggattgacgttttgcttgagtcctcttgtgagggcgagtcctaaccggaattggagccagaagggaggattgccgcctgaattgggactttctggtgagactagggcaccggtaaagccgcatctgtctactgcggcctcgttttgcgcgaaccggtcgaggaagcttgccgattttggaagagtcaatcacaaccgttaa

SEQ ID NO: 733 - protein, 332 aa, Populus balsamifera subsp. trichocarpa
  misc_feature (1)..(332): Ceres GDNA ANNOT ID no. 1486315
  misc_feature (1)..(332)
  Functional Homolog of CDNA ID no. 23360146at SEQ ID no. 729with e-value of 6.8E-46 and percent identity of 49.13
MRCNKHPCDLSCSVGVCASCLRERLSALIAAQVQIQQQQQQQIAQLAKAHHNPRAATVIDESRKSDSNSQHHQQQQQQQQPPPLIFPLSVSPYVSRRKSDDHSSWYAHNQHHNLRFYSTPQVGPTYTTTTTAAYKKRNKKFSLFSSLFRSRSDKFSTHSTSYRDSIEASSSSSPSWLSTIFSGRRRKQSTQLSMGYSGSVSGKPRQRLDRGMSPARGSVSEEDCENCDRSPSGSGFSPESSPGWKKTPVSQASMRRGKAGHTRNVSGLTFCLSPLVRASPNRNWSQKGGLPPELGLSGETRAPVKPHLSTAASFCANRSRKLADFGRVNHNR

SEQ ID NO: 734 - protein, 311 aa, Glycine max
  misc_feature (1)..(311): Ceres CLONE ID no. 712340
  misc_feature (1)..(311)
  Functional Homolog of CDNA ID no. 23360146at SEQ ID no. 729with e-value of 8.3E-41 and percent identity of 45.26
MKCKKHTSDLSSTVGVCASCLRERLISLAAAQAQAQAHHPQAQLTRVISRASDDYSRNSDPNPPPPLIFPRSVSPYVSRRKSDYPADWLDDRRERLFYSTPQLGPTFCAGDSEYHADAKSFKKRFNKFRIFAKIFRTRSEKFQSDPSCEQASHASPSWFSAFFPTRRRNKDRSGTTKEYSSAAARRRYRPSDRGMSPVTTEDFGDECDQSPSGSGYVSEASPWWRRTPAVAPSARRSRLGHTKSASGSGMALCLSPLVRASPNRRWNHKGLPPEMAEVRAAAAKPHLSAAASFCANRSRKLADFGRVNHNR

SEQ ID NO: 735 - protein, 301 aa, Glycine max
  misc_feature (1)..(301): Ceres CLONE ID no. 1235862
  misc_feature (1)..(301)
  Functional Homolog of CDNA ID no. 23360146at SEQ ID no. 729with e-value of 1.3E-15 and percent identity of 55.41
MKCKKHTSDLSSTVGVCASCLRERLIALVAARVISRASDEYSRNSDPNPPPPLIFPRSVSPYVSRRKPDYAAAWHDDRRDRLFYSTPQLGPTFCAGDSAYHADAKSFKKRFNKFRIFAKIFRTRSEKFQSDPSCEQASYASPSWFSAFFPTRRRNKDRTGTTEEYSSSAPRRRYRPSDRGMSPVTTEDFGDECDQSPSGSGYVSEASPWWRRSPTVAPSARRSRLGHTKSSSGSGMALWLSPLVRASPNRRWNHKGLPPEMAAAAEVRAAAAKPHLSAAASFCANRSRKLADFGRVNNHNR

SEQ ID NO: 736 - protein, 283 aa, Zea mays
  misc_feature (1)..(283): Ceres CLONE ID no. 335314
  misc_feature (1)..(283)
  Functional Homolog of CDNA ID no. 23360146at SEQ ID no. 729with e-value of 8E-24 and percent identity of 32.27
MRCKKHPYQVGGGGVCATCLRDRLIALEAAQNGDASSSPPPAAAPVFPRSVSPYVSRRKSDTSGGGGALRHHPSLLFFRTPQVGPAYGGGALEEGDIGYEYKRRRAGKFSVLATLFGHHHGHRSEETHQEGATERKKHSWFAAIMPRRRKKQAAPASITSPRSAPPRRSCRVVSNRGLSPERDSHGSGDESSSPAADPPWRPSPSPMRRTRCRRRQTNSMPSGFAVCLSPLVRPSPGRRRHVQPPDPGSFSSEFRPSPLHSLSSAASVTRCRSRKLADVGRFR

SEQ ID NO: 737 - DNA, 1183 bp, Arabidopsis thaliana
  misc_feature (1)..(1183): Ceres CDNA ID no. 23358032
  misc_feature (1)..(1183): Also Known As  Ceres SEEDLINE ME11099
aaacagttctcatttggtaaatgctccatactttcttcacttctccaacaaaacacaaaaaacaagaaaagaaaaaaaaatgacgaaacgtttcaaattaaagatttcaagaatcctctcattcaaatcttgccgtttaaaagatccttcttctcttccttttaatcctgtttcttcaagtctccgacgtacttctccactggttaactcctccgccgacgtcaccaccgtgccgcaacgtcgccgttcttctttcagactacacgttttaactgtgtttggctgcggacgctcgtccacgccgttggatgttgatctgagaaactcaccggtgttatctccgccgcaaacgccgacgtttcagtgggaaagtgaagggaagtggcacgtgattgctcaagtcactgaagaagaatacgaaacgcctcgtcggaaaatatacaacggtgggtcggagaaagataatcgccggcgtttaaagaagaaggagaaatcaaactctcggcggcgagggagcatttcctccgccgaagaagagactgatagagagagtctcttaccatcttctacaaacctctcgccggaatattcctcttccgagctaccgcgtgtcacaagacgtccgagacaacttctcaagaaggcggtgatcgaggaagaaagtgaatcatcatcaccgccaccgtctccggcgagactgtcttcgtttgtgcagagattaatgccgtgtacgatggcggcggcggttatggtggaaggagtggcggtggtgaagaaatcggaggatccatacgaagattttaaaggatcaatgatggagatgatagtagagaagaagatgtttgaagtagctgagcttgaacagcttcttagttgcttcctatcgctaaacgcgaaacgccaccaccgcgcgattgtaagagcgttttcagagatttgggttgctttgttctccggtggtagtggtggtggtcggagatcgtcctccttctcgagtgttcgactctcagactacgatgagtgttaaaataataatgttaaaaattaaaatcctctgtttatgataatgtctaactaaattctactaaatttttttcacttttagtgacgatgtaaatgttaaatgtaaattatgcggcggtgcaattattaaaactgtaatcattaaatgcgtaggctaatt

SEQ ID NO: 738 - protein, 315 aa, Arabidopsis thaliana
  misc_feature (1)..(315): Ceres CDNA ID no. 23358032
  misc_feature (1)..(315): Also Known As  Ceres SEEDLINE ME11099
  misc_feature (234)..(293): Pfam Name: DUF623 Pfam Description: Protein of unknown function, DUF623
  misc_feature: Phenotype: ROSETTE LEAVES Useful for making ornamental plants with modified leaves
  misc_feature: Phenotype: Oval Shaped Useful for making plants with increased biomass and foliage
  misc_feature: Phenotype: Short Petioles Useful for making smaller plants
MTKRFKLKISRILSFKSCRLKDPSSLPFNPVSSSLRRTSPLVNSSADVTTVPQRRRSSFRLHVLTVFGCGRSSTPLDVDLRNSPVLSPPQTPTFQWESEGKWHVIAQVTEEEYETPRRKIYNGGSEKDNRRRLKKKEKSNSRRRGSISSAEEETDRESLLPSSTNLSPEYSSSELPRVTRRPRQLLKKAVIEEESESSSPPPSPARLSSFVQRLMPCTMAAAVMVEGVAVVKKSEDPYEDFKGSMMEMIVEKKMFEVAELEQLLSCFLSLNAKRHHRAIVRAFSEIWVALFSGGSGGGRRSSSFSSVRLSDYDEC

SEQ ID NO: 739 - protein, 352 aa, Lycopersicon esculentum
  misc_feature (1)..(352): Public GI no. 23429649
  misc_feature (1)..(352)
  Functional Homolog of CDNA ID no. 23358032at SEQ ID no. 738with e-value of 5.6E-32 and percent identity of 35.60
MGKSLKLRFSRVIASFNSCRSKNPSSLPQNPNFFPHKLTSTKHISPDFPLIDQNQNQNHRNYVPESTMISVGCCRSEFKWEKEEKFHVVSSSFVSEEEECEEEINLALRPPLTPPRFSRIVVEKKKKKQQRVKKTKTKSRIIRMSTSSADEYSGILSGTNTDWDNNEEETESLVSSSRSCYDFSSDDSSTDFNPHLETICETTTMRRRHKRNANTKRRSIKQSRPSFSSSKGRRSSVSTSSDSELPARLSVFKKLIPCSVDGKVKESFAIVKKSQDPYEDFKRSMMEMILEKEMFEKNELEQLLQCFLSLNGKHYHGVIVEAFSDIWETLFLGNNDRVRRMSIHDPTPTYCR

SEQ ID NO: 740 - DNA, 1248 bp, Arabidopsis thaliana
  misc_feature (1)..(1248): Ceres CDNA ID no. 23457728
  misc_feature (1)..(1248): Also Known As  Ceres SEEDLINE ME11116
aaactatcaaccaccaaaatctttcacattacaccttccttttgtcctcaaaccaaaaccctagaaaccaaaaatggaaaaagccttgagaaacttcaccgaatctacccactcaccagaccctaatcctctcacaaaattcttcactgaacctacagcctcacctgttagccgcaaccgcaaactgtcttcaaaagataccactgtaaccatcgccggagctggcagcagcacgacgaggtaccgcggcgtacgccggaggccgtggggacgatacgcggcggagatacgtgacccaatgtcgaaggagagacgttggctcggaacatttgacacggcggaacaagccgcttgtgcttacgactctgcggctcgtgcctttcgtggagcaaaggctcgtactaattttacttatccgacagctgtcattatgcctgaaccaaggttttctttttccaacaagaaatcttcgccgtctgctcgttgtcctcttccttctctaccgttagattcctctacccaaaacttttacggtgcaccggcagcgcagaggatctataatacacagtctatcttcttacgcgacgcctcgtgttcctctcgtaaaacgactccgtataataactctttcaacggctcatcatcttcttactcagcatcgaaaacggcatgcgtttcttattccgaaaacgaaaacaacgagtcgtttttcccggaagaatcttctgatactggtctattacaagaggtcgttcaagagttcttgaagaaaaatcgcggcgttcctccttctccaccaacaccaccgccggtgactagccatcatgacaactctggttatttctctaatctcactatatactctgaaaatatggttcaagagactaaggagactttgtcgtcgaaactagatcgctacgggaattttcaagctaatgacgacggcgtaagagccgtcgcagacggtggtttatcgttgggatcaaacgagtgggggtatcaagaaatgttgatgtacggaactcagttaggctgtacttgccgaagatcgtggggatagctagatattcatcatgattatgttttgagttttggtactatcgacttagtttaaagttgctacctttcccaatgttggatattaactaaattatgttttaagttgaatttgctaataggatttcataattataatcaagtttataatatattttcgtagctaattaaagtttatatccacgtattctg

SEQ ID NO: 741 - protein, 328 aa, Arabidopsis thaliana
  misc_feature (1)..(328): Ceres CDNA ID no. 23457728
  misc_feature (1)..(328): Also Known As  Ceres SEEDLINE ME11116
  misc_feature (55)..(112): Pfam Name: AP2 Pfam Description: AP2 domain
  misc_feature: Phenotype: Late Flowering Useful for delaying flowering time
  misc_feature: Phenotype: Dark Green Useful for increasing chlorophyll and photosynthetic capacity
  misc_feature: Phenotype: Curled 4 Useful for making plants with altered leaf shape e.g., curled leaves
  misc_feature: Phenotype: Short Petioles Useful for making smaller plants
MEKALRNFTESTHSPDPNPLTKFFTEPTASPVSRNRKLSSKDTTVTIAGAGSSTTRYRGVRRRPWGRYAAEIRDPMSKERRWLGTFDTAEQAACAYDSAARAFRGAKARTNFTYPTAVIMPEPRFSFSNKKSSPSARCPLPSLPLDSSTQNFYGAPAAQRIYNTQSIFLRDASCSSRKTTPYNNSFNGSSSSYSASKTACVSYSENENNESFFPEESSDTGLLQEVVQEFLKKNRGVPPSPPTPPPVTSHHDNSGYFSNLTIYSENMVQETKETLSSKLDRYGNFQANDDGVRAVADGGLSLGSNEWGYQEMLMYGTQLGCTCRRSWG

SEQ ID NO: 742 - DNA, 845 bp, Arabidopsis thaliana
  misc_feature (1)..(845): Ceres CDNA ID no. 23517564
  misc_feature (1)..(845): Also Known As  Ceres SEEDLINE ME11117
gggaattagacaaggagtagtaatatgaaagatggaggatcaggaaacgaagcggataaccaaaaaaccgtcaagatcgatcatcatcagtctcaaagatattcctcctctcgacccttcttctattccctctatgaaaccaatggcgcaagatcatcataatgtgggaatgcagagattccaagagaagactgacttcaagtttgaagaagaagacaatgccatttcttccttctctaacattcaaattgatcctaacagcacaagaagcatttcactagagaagaagcttgctcctaaaccagatgaagaacacaccaccaccaccaaacccatatctaaagatgatgaatctaagactaggagaggctcagctaaatcggtgttacacgaaatgtgtgcttccaagcgttggagacctcctgtttatgaatgctgcaatgttgatggaccttgccatttgagattatttacatacaaagttatggttgagattagagattcttcagggaaaactgttttggagtgttttggggatcccagacgcaaaaagaaagctgctgctgagcatgcagcagaaggagcgctttggtatcttgagcatgtgaagacaaagccgcatcagtaaatcatcatttagtcgatatgaagtagctggagagtttagtaaagccatctatagttagttctaacgagggaagcttgaaccatattatacctatcttttaattcattatagctctatgggttgtaacagttttgatctgtatcagaacttttctttcaaactttgtgccattatatttctccttagtaaggagcctttatctttatctttatgttta

SEQ ID NO: 743 - protein, 198 aa, Arabidopsis thaliana
  misc_feature (1)..(198): Ceres CDNA ID no. 23517564
  misc_feature (1)..(198): Also Known As  Ceres SEEDLINE ME11117
  misc_feature (115)..(189): Pfam Name: dsrm Pfam Description: Double-stranded RNA binding motif
  misc_feature: Phenotype: Curled 3 Useful for making plants with altered leaf shape e.g., curled leaves
MEDQETKRITKKPSRSIIISLKDIPPLDPSSIPSMKPMAQDHHNVGMQRFQEKTDFKFEEEDNAISSFSNIQIDPNSTRSISLEKKLAPKPDEEHTTTTKPISKDDESKTRRGSAKSVLHEMCASKRWRPPVYECCNVDGPCHLRLFTYKVMVEIRDSSGKTVLECFGDPRRKKKAAAEHAAEGALWYLEHVKTKPHQ

SEQ ID NO: 744 - DNA, 1505 bp, Arabidopsis thaliana
  misc_feature (1)..(1505): Ceres CDNA ID no. 13575362
  misc_feature (1)..(1505): Also Known As  Ceres SEEDLINE ME11122
  misc_feature (1)..(1505): Also Known As  Ceres CLONE ID no. 406311
ccctgacgtagcttttttgaaagcaaagtgaaaagccaattgatttgatataactttatagaattaaatatagacagtttgagttggttcgatgacatttatttctctgcctctttcccaacgtcccccttctttataaggcagagtagagtaataagaccggtccatgaccctcacgtgacctctctcactctcacgtgcctctcttctcctccgtcattaatataaaacagttggggaatttataactttcttcttcttcttcttctctctctgtttctctctgtgcgagctctctcctctcatcaatggaatctctcatcaatcccagccatggcggaggaaactacgattctcactcttcttctctcgatagtctcaaaccaagcgtactagtcatcattctcattctcctcatgactcttctcatctccgtttccatttgcttcctcctccgctgtctcaatcgctgtagccaccgctccgttctccctctttcatcttcctcttccgtcgcaaccgtaacttccgattcccgacgattctctggacatcgagtctctcccgaaacagaacggtcctccgtgcttgattcgcttccgattttcaaattctcctccgtcactcgccgatctagctccatgaattccggagattgcgccgtttgtttgtcgaaattcgaaccggaggatcagctccgtcttcttcctctctgttgtcacgcttttcacgccgattgtatcgatatctggctagtctctaaccagacttgtcctctctgtcgctctcctctcttcgcttcagaatctgatctcatgaagtctctcgccgtcgtcggctcaaacaacggcggaggagaaaacagcttccgtctcgaaatcggatccatcagccgtcgtcgtcaaacaccgattccagaatccgttgagcagcatcgaacttactcaatcggttcgttcgattacatagtagacgacgtagattcagaaatctcagagtcaaatttcaaccgtggaaaacaggaagacgcgactacaacaactgccacagcaacggcggttacgactaatccgacgtcgtttgaagctagtttagcggcggatataggtaacgatggttctagaagctggctcaaggattacgttgacagactctcacgaggtatatcgtcgcgtgcaatgtcgtttagaagctctggtagattttttactgggagtagtcgtcggagtgaggaattgacggtgatggatttagaagcgaatcatgccggagaagagataagtgagcttttccggtggctctcaggggtgtgagtgacaggtgagttggtgacatttgttcattcacttggaaaaaaaaacagagcattacttttggtttgtacatataaacactatttgaagttctttgcttcaattaccgattttttttttctttttctgacgatataacagatgaattctctagttatatattattacttttaaatggtctattttctcttt

SEQ ID NO: 745 - protein, 334 aa, Arabidopsis thaliana
  misc_feature (1)..(334): Ceres CDNA ID no. 13575362
  misc_feature (1)..(334): Also Known As  Ceres SEEDLINE ME11122
  misc_feature (1)..(334): Also Known As  Ceres CLONE ID no. 406311
  misc_feature (117)..(158): Pfam Name: zf-C3HC4 Pfam Description: Zinc finger, C3HC4 type (RING finger)
  misc_feature: Phenotype: Late Flowering Useful for delaying flowering time
  misc_feature: Phenotype: WHOLE PLANT Useful for making bigger plants
  misc_feature: Phenotype: Serrate Margins Useful for making plants with increased biomass and foliage
MESLINPSHGGGNYDSHSSSLDSLKPSVLVIILILLMTLLISVSICFLLRCLNRCSHRSVLPLSSSSSVATVTSDSRRFSGHRVSPETERSSVLDSLPIFKFSSVTRRSSSMNSGDCAVCLSKFEPEDQLRLLPLCCHAFHADCIDIWLVSNQTCPLCRSPLFASESDLMKSLAVVGSNNGGGENSFRLEIGSISRRRQTPIPESVEQHRTYSIGSFDYIVDDVDSEISESNFNRGKQEDATTTTATATAVTTNPTSFEASLAADIGNDGSRSWLKDYVDRLSRGISSRAMSFRSSGRFFTGSSRRSEELTVMDLEANHAGEEISELFRWLSGV

SEQ ID NO: 746 - DNA, 1050 bp, Populus balsamifera subsp. trichocarpa
  misc_feature (1)..(1050): Ceres GDNA ANNOT ID no. 1486224
atgtctgctcccccagacttgttcaccacaacacccaccgatacggccagcggaggcaccaagacttcgccgtttcagaaccttaactcaagcatattgatcatcattttaatcctctccatcactctgttagtctctgtttctctttgcttccttcttcgtgtcttaaaccgccgttgcctcagccacctctctccctctagaaccaccgccacaactaccacgataacagccccctcctcctctaaccgtcactcaggtaacaacaaccaccgtgtttcaccagaaaccttagagccttccatttctgactcacttcctctcttctccttttcctccatcaaacggcggtcatcctcctcccctgctatctccggcggcgattgcgcggtttgtctgtccaagttcgaaccggatgatctcttgcgattgcttccgctttgttgtcatgctttccatgcacattgcattgacacgtgggtcaattctaatcaatcatgtcctctctgccggtctcctattcttatatcggagtccgacctcgccaaagctatctccgatgtcgaagctcgcggtggtgatagtttccgccttgagattggttctattagccgccgagaacatcctgctcctaactcggcctcctctctctccacatccgccgcctcctttgctgcaggcgagcatcggagctcgtactctgttggttcgtttgattacgtcgtggaggaggaatcggaggttacgatcaatcaatcacacaggaggagcatgtcgaaggagagtggtggcggtggcggtccgacattgtccgagcagcagattttggcagcggaagtggctgcggcgagaggaagttggttaagagaatacgttgaccgtctatcggcttctctctcttcacgcacggcatcgtttagaggttctggaaggttctttacgggaagcagtcgccggagcgagatcgccggtgttggggattatgatttggaggcgaaccgtgtaggagaagaaattagcgaactgtttcgttggttttcaggggtataa

SEQ ID NO: 747 - protein, 349 aa, Populus balsamifera subsp. trichocarpa
  misc_feature (1)..(349): Ceres GDNA ANNOT ID no. 1486224
  misc_feature (1)..(349)
  Functional Homolog of CDNA ID no. 13575362at SEQ ID no. 745with e-value of 5.3E-78 and percent identity of 59.67
MSAPPDLFTTTPTDTASGGTKTSPFQNLNSSILIIILILSITLLVSVSLCFLLRVLNRRCLSHLSPSRTTATTTTITAPSSSNRHSGNNNHRVSPETLEPSISDSLPLFSFSSIKRRSSSSPAISGGDCAVCLSKFEPDDLLRLLPLCCHAFHAHCIDTWVNSNQSCPLCRSPILISESDLAKAISDVEARGGDSFRLEIGSISRREHPAPNSASSLSTSAASFAAGEHRSSYSVGSFDYVVEEESEVTINQSHRRSMSKESGGGGGPTLSEQQILAAEVAAARGSWLREYVDRLSASLSSRTASFRGSGRFFTGSSRRSEIAGVGDYDLEANRVGEEISELFRWFSGV

SEQ ID NO: 748 - DNA, 1056 bp, Populus balsamifera subsp. trichocarpa
  misc_feature (1)..(1056): Ceres GDNA ANNOT ID no. 1444021
atgtccgctcctccatattcgtttatccctctaaacaacaccgacgaggccagcgatacaagcggaggcaccaagtcgccctttcagaacctaaactcaagcattttgatcatcattttaatcctctccgtaactctgttagtctctgtttctctttgtttccttctccgtatcttaagccgccgttccctccgccacctttctccctctagaaccaccgccatagctaccacaataacaaccttatcctctaaccgcctctccagtaacaacaaccatcgtgtttcaccggaagatttagagtcttccgtttctgactcactccctctcttctctttctcctccatcaaacacagaccatcctcttcccctgaaatctccagcggcgattgcgcggtttgtttatcgacgttcgaaccagaggatatcctgcgattgcttccgctctgctgtcatgctttccatgcacattgcattgaaacatggctcaattctaaccaatcgtgtcctctttgccggtctcgtattcatttttcggaatcagagctcgccaaagctctctttgaaggtgacgctcgtggtggtgatagcttccgccttgagattggctctattagccgtcgagaacatactgctcctaaccccgcgtcctctctctctacagccacagcctccgccggtgcagacgaggatcggagcacgtactcggttggttcgtttgattatgtcgtggaggaggaatcggaggttactatcagtcaatcgcacagaaggagtatgtcgaaggagagtggtcgcgggggtggtctgacattgtccgaggagccgattctggcagcagaagtggcttcggcgagaggaagtttgttaagagaatatgttgataggctgtctgcttctctctcttcacgtacgacatcttttagaggttctggaaggttatttaccggtagcagtggccggagcgagattgccggtggcggagattatggtttgggggcgagtcgtgctggagaagaaattagtgagctgtttcgttggttttcaggggtatga

SEQ ID NO: 749 - protein, 351 aa, Populus balsamifera subsp. trichocarpa
  misc_feature (1)..(351): Ceres GDNA ANNOT ID no. 1444021
  misc_feature (1)..(351)
  Functional Homolog of CDNA ID no. 13575362at SEQ ID no. 745with e-value of 5.3E-71 and percent identity of 58.03
MSAPPYSFIPLNNTDEASDTSGGTKSPFQNLNSSILIIILILSVTLLVSVSLCFLLRILSRRSLRHLSPSRTTAIATTITTLSSNRLSSNNNHRVSPEDLESSVSDSLPLFSFSSIKHRPSSSPEISSGDCAVCLSTFEPEDILRLLPLCCHAFHAHCIETWLNSNQSCPLCRSRIHFSESELAKALFEGDARGGDSFRLEIGSISRREHTAPNPASSLSTATASAGADEDRSTYSVGSFDYVVEEESEVTISQSHRRSMSKESGRGGGLTLSEEPILAAEVASARGSLLREYVDRLSASLSSRTTSFRGSGRLFTGSSGRSEIAGGGDYGLGASRAGEEISELFRWFSGV

SEQ ID NO: 750 - protein, 295 aa, Medicago sativa; identical to SEQ ID NO: 709
  misc_feature (1)..(295): Public GI no. 23451086
  misc_feature (1)..(295)
  Functional Homolog of CDNA ID no. 13575362at SEQ ID no. 745with e-value of 1.6E-56 and percent identity of 53.93

SEQ ID NO: 751 - protein, 359 aa, Glycine max
  misc_feature (1)..(359): Ceres CLONE ID no. 474127
  misc_feature (1)..(359)
  Functional Homolog of CDNA ID no. 13575362at SEQ ID no. 745with e-value of 6E-75 and percent identity of 54.46
MASPPPLSLNVVGSDTDPNTNTFPTVTSSLTPPSPRRSSPLQNLSPSILIIVTVLAVTVIVSLALCFLLRHLNRRCLRRFSSSAPPSAAATPIFASSRRISPEILHSSASASASVIDTLPVFTFSSVTRRSSSVAGDCAVCLSKFHHHDLLRLLPLCCHAFHAECIDTWLQSNLSCPLCRSAIVADDSDLAKILRPPSSGGSSDSFRLELGNISRRGTDGAAEGGSVARGGSRSYSIGSFEYLVDDESEVPFSHASRRSVDDAKEFPAPAEAPVRHNEANLAGEVGGVRSWLKDYVDRVSASISSRTASFRGSGRFFSGGGGSSGRRSDVVPVAASEYDVEGNRIGEEISEMFRWLSGV

SEQ ID NO: 752 - DNA, 1208 bp, Arabidopsis thaliana
  misc_feature (1)..(1208): Ceres CDNA ID no. 23511212
  misc_feature (1)..(1208): Also Known As  Ceres SEEDLINE ME11142
aaacccggtaaactaagaaagcacaaaacttcttcagattcttggaatgatgagatggggaagaaagaaacctgtttcttcttcttcttcttccgggttgtctcgtgctcttcctgtttcttggttttcaaagttaagtggttcttctgacttgaaacctgcaaaagagaagaagcaagatgaaaaagctagccagaacatatctgtaaaaacttccttgagttctactacacgtcgaagtgatattcatgagaacagcaaaaggtttcaaagagtatcagtagaaaaggagaactctgcaacaagatcagcagataaagagtcgaatgagaagtttgaagagataatgagcagtgtgaggaagaaagtaagagatttccaaaaagagacatgtggttttctggaagtggaggcaatggatagagacaacggaactgtgatcctgacgccaagaattcaggtgaacagagataaacagagatgtgagagacgtgaccaaaggcttcttgaacaaaagccaaagagatcagaacaagacgcgggggtcaaggtgaaaaaaccagctagaaggacaggtacaggaggttacagtagagaagattccgtgattcttggtcataccataacaaaaccggctcatcagtgggaaaagctcaaggaagtcaaactaagagaagtgaagctgaaggctgaccaacagaggaaatctctgtacctaaaaagggagctaaacagaataggaacaaaagaaaacaacaaagttagagttttttcaccaagagcatctgaaaaatgcagagttaaagctattgaagacttgaaaaaggccaaacagagagcacgggagcacgagcttctgatagaaacagcagatggaggaatggagaacgaaagctttgcagtagtgaaatgctcaagtgatcctcagaaggattttagagattcaatgattgagatgattatggagaatggtatcaaccatccagaagaactcaaagagcttctggtttgttatctcagactcaatacagatgaatatcatgacatgatcatcagtgtgttccagcaggtgcataatgattttaattttcattaattttggtgtagaatagtaacatatagattcatcagtatgatttgtggatagtttaagctttctacgatgtaacttcatgcttcttggtaatactaaaactgataacaattct

SEQ ID NO: 753 - protein, 349 aa, Arabidopsis thaliana
  misc_feature (1)..(349): Ceres CDNA ID no. 23511212
  misc_feature (1)..(349): Also Known As  Ceres SEEDLINE ME11142
  misc_feature (290)..(349): Pfam Name: DUF623 Pfam Description: Protein of unknown function, DUF623
  misc_feature: Phenotype: Oval Shaped Useful for making plants with increased biomass and foliage
  misc_feature: Phenotype: Oval Shaped Useful for making plants with increased biomass and foliage
  misc_feature: Phenotype: Undulate Shaped Useful for making plants with increased biomass and foliage
MMRWGRKKPVSSSSSSGLSRALPVSWFSKLSGSSDLKPAKEKKQDEKASQNISVKTSLSSTTRRSDIHENSKRFQRVSVEKENSATRSADKESNEKFEEIMSSVRKKVRDFQKETCGFLEVEAMDRDNGTVILTPRIQVNRDKQRCERRDQRLLEQKPKRSEQDAGVKVKKPARRTGTGGYSREDSVILGHTITKPAHQWEKLKEVKLREVKLKADQQRKSLYLKRELNRIGTKENNKVRVFSPRASEKCRVKAIEDLKKAKQRAREHELLIETADGGMENESFAVVKCSSDPQKDFRDSMIEMIMENGINHPEELKELLVCYLRLNTDEYHDMIISVFQQVHNDFNFH

SEQ ID NO: 754 - DNA, 636 bp, Arabidopsis thaliana
  misc_feature (1)..(636): Ceres CDNA ID no. 2702136
  misc_feature (1)..(636): Also Known As  Ceres SEEDLINE ME11224
atgtgtagtaacaacaacacaagtagtggaagctatggagagttacagttacatgatgagtcctctggttcttgtcggaagaaacagaagaaagacaaagtacgacgaagaggacctggtgttgctgaactcgagaagatccgtcttcaagaagagtacaaacctccactttcttcgtctccttcattaccaaacattgatcatcatcatcacactctctttgctccggctagtagcgtctatgatttagtgatgacttctccaaacttttctttccccgagaaacttgcgtcaacgttaccggttttcccgatttcgccggatgcgacacaaaaccggtcaatgggtataactccggttcaagagaccggtacaacaactagcaaccccatcgccattgattcacctacgtccattccacgtcattacccgaggtttatcccgcttggtttacagtatgaacaacaacaacaaaaactaaaagacttggatgagactatgcaatggagaagtaagaagcctttctacagctttataccctctggtgatccgagcaatgatgaccaagaacaacgaccatgtgacctatttggatcagctgctgatcatggaattgatctcaaccttaagttatag

SEQ ID NO: 755 - protein, 211 aa, Arabidopsis thaliana
  misc_feature (1)..(211): Ceres CDNA ID no. 2702136
  misc_feature (1)..(211): Also Known As  Ceres SEEDLINE ME11224
  misc_feature: Phenotype: Curled 1 Useful for making plants with altered leaf shape e.g., curled leaves
  misc_feature: Phenotype: Curled 2 Useful for making plants with altered leaf shape e.g., curled leaves
  misc_feature: Phenotype: Curled 3 Useful for making plants with altered leaf shape e.g., curled leaves
  misc_feature: Phenotype: Curled 4 Useful for making plants with altered leaf shape e.g., curled leaves
  misc_feature: Phenotype: Trident Shaped Useful for making plants with increased biomass and foliage
MCSNNNTSSGSYGELQLHDESSGSCRKKQKKDKVRRRGPGVAELEKIRLQEEYKPPLSSSPSLPNIDHHHHTLFAPASSVYDLVMTSPNFSFPEKLASTLPVFPISPDATQNRSMGITPVQETGTTTSNPIAIDSPTSIPRHYPRFIPLGLQYEQQQQKLKDLDETMQWRSKKPFYSFIPSGDPSNDDQEQRPCDLFGSAADHGIDLNLKL

SEQ ID NO: 756 - DNA, 1329 bp, Arabidopsis thaliana
  misc_feature (1)..(1329): Ceres CDNA ID no. 12670870
  misc_feature (1)..(1329): Also Known As  Ceres SEEDLINE ME11241
atggattcaactgtgttcatcaataacccatctttaaccttacctttctcttacacatttaccagtagcagcaacagtagcacaacaacgagcaccaccacagactcaagctccggtcaatggatggacggtcggatttggagcaagctaccacctcctcttcttgaccgcgtcattgcttttcttccacctccggcgtttttccggacacgttgcgtctgcaagagattctacagtctacttttctccaacaccttcctcgagacatatctacaactacttcctctccgacacaactgtttcctcttcttcaaacacaaaaccctaaagagttacatttacaagagaggaggaacaaacgatgatgattccaataaagctgaaggctttttgtttgatcctaatgagatccgatggtaccgtctctcttttgcttatatcccttcagggttttatccttcaggatcatcaggagggttagtgagttgggtctccgaagaagctggtcttaaaaccattctcttgtgtaaccctcttgtcggatccgtgagtcagttgccaccaatatcaaggccaaggcttttcccttcgataggtctctcggtaacaccaacctctattgatgttactgtcgctggagatgatctcatatctccttacgctgtgaaaaacctctcatcggagagtttccatgtcgacgccggcggattcttttccctctgggcgatgacttcttctttgccacggctttgtagcttggaatctggtaagatggtttacgtgcaaggcaagttttactgtatgaactatagcccttttagcgttttgtcctatgaagttactggaaaccggtggatcaagattcaagctccgatgaggagatttctcagatctccaagcttgttagagagcaaagggaggcttattcttgtagcagctgttgagaaaagcaagttgaacgttcccaaaagcctacgactttggagtttgcaacaagataacgccacatgggtcgagatcgaacggatgcctcagccgctctacacacagtttgcagcagaagaaggtggaaaaggattcgagtgtgtcggaaatcaagagtttgtaatgattgtgttaagaggaacctcgttgcagttgctgtttgatatagtgagaaaaagctggctgtgggtcccaccgtgtccttactccggcagtggtggcggtagctcaggtggcggttcagacggagaggtcttgcagggttttgcttatgacccggtgcttactacaccggtggttagtcttcttgatcagttaacacttccatttcctggagtctgttag

SEQ ID NO: 757 - protein, 442 aa, Arabidopsis thaliana
  misc_feature (1)..(442): Ceres CDNA ID no. 12670870
  misc_feature (1)..(442): Also Known As  Ceres SEEDLINE ME11241
  misc_feature (47)..(92): Pfam Name: F-box Pfam Description: F-box domain
  misc_feature: Phenotype: Serrate Margins Useful for making plants with increased biomass and foliage
  misc_feature: Phenotype: Undulate Shaped Useful for making plants with increased biomass and foliage
MDSTVFINNPSLTLPFSYTFTSSSNSSTTTSTTTDSSSGQWMDGRIWSKLPPPLLDRVIAFLPPPAFFRTRCVCKRFYSLLFSNTFLETYLQLLPLRHNCFLFFKHKTLKSYIYKRGGTNDDDSNKAEGFLFDPNEIRWYRLSFAYIPSGFYPSGSSGGLVSWVSEEAGLKTILLCNPLVGSVSQLPPISRPRLFPSIGLSVTPTSIDVTVAGDDLISPYAVKNLSSESFHVDAGGFFSLWAMTSSLPRLCSLESGKMVYVQGKFYCMNYSPFSVLSYEVTGNRWIKIQAPMRRFLRSPSLLESKGRLILVAAVEKSKLNVPKSLRLWSLQQDNATWVEIERMPQPLYTQFAAEEGGKGFECVGNQEFVMIVLRGTSLQLLFDIVRKSWLWVPPCPYSGSGGGSSGGGSDGEVLQGFAYDPVLTTPVVSLLDQLTLPFPGVC

SEQ ID NO: 758 - protein, 442 aa, Arabidopsis thaliana
  misc_feature (1)..(442): Public GI no. 1362011
  misc_feature (1)..(442)
  Functional Homolog of CDNA ID no. 12670870at SEQ ID no. 757with e-value of 0 and percent identity of 95.02
MDSTVFINNPSLTLPFSYTFTSSSNSSTTTSTTTDSSSGQWMDCRIWSKLPPPLLDRVIAFLPPPAFFRTRCVCKRFYSLLFSNTFLETYLQLLPLRHNCFLFFKHKTLKSYIYKRGGTNDDDSNKAEGFLFDPNEIRWYRLSFAYIPSGFYPSGSSGGLVSWVSEEAGLKTIRKALALILVATDSRIRQEGYTRPSIGLSVTPTSIDVTVAGDDLISPYAVKNLSSESFHVDAGGFFSLWAMTSSLPRLCSLESGKMVYVQGKFYCMNYSPFSVLSYEVTGNRWIKIQAPMRRFLRSPSLLESKGRLILVAAVEKSKLNVPKSLRLWSLQQDNATWVEIERMPQPLYTQFAAEEGGKGFECVGNQEFVMIVLRGTSLQLLFDIVRKSWLWVPPCPYSGSGGGSSGGGSDGEVLQGFAYDPVLTTPVVSLLDQLTLPFPGVC

SEQ ID NO: 759 - DNA, 1320 bp, Populus balsamifera subsp. trichocarpa
  misc_feature (1)..(1320): Ceres GDNA ANNOT ID no. 1485236
atggaaggtgctttcagcaattccatgccctcacacttctcctacactttcacccctgggactagtagtgcttatgttacagatactgtcaccaatacttggatggacaccaggatatggagtaagctcccgcaatcgctgattgatcgtgtaatcgcctttcttccacctccagccttttttagagctcgttgtgtctgcaagagatggtatagtctcttgttctccaacaattttcttgaactctatatccaaatatccccacgccgccattggttcttattcttcaagcacaaaagcttaaaaagctacatctgtggaaacaacagtaacaccactcgtggcagtggcggccaaactagtacaaccaatatatttgaagggtacctctttgatccttacgatattgcatggtatagaatttcttttcccttggttccatctgggttctcgcctgctgctgcttctggtggcttaatatgttgggtctcagatgaggctggtgcaaagagtatcattttatgcaacccacttattggctctctatctcagttgccgccaacgttaagaccacgtctctttccttcaactggcttaaaagttgggccatcctcaattgatgtggctgttgcaggtgatgacttgatttctccatatgcagtcaagaatttatccactgaaagttttcatattgatgctggtgggttttactctctatggggtactacttcttctcttccaaggctttgtagccttgaatcaggtcaaatggtttgtgttgatgacagattttactgcatgaattacaacccatttagcgttttggcttatgaaatagcagcaaacagctggtgcaagattcaagctccaatgaggagatttctgcgctcgccaagcttggttgagagcatggaaaaactcattcttgttgcagcagtggagaagagcaagctcaacgtgccaaagagcttgagactttggagtttgcaagcttgtggaacaacatgggtagagattgaaaggatgccccagcaactttaccaacaatttgaggagatggaagctggtcacgggtttgattgtgttggacatggtgagtttattgctatcattatcagaggatcggacaaggctttgctgtttgatatcttaaggaaggcgtggcagtggattcctccatgtccttacatgaatcacggaggtggaggtgatgatgaattgcatggttttgcttatgagcctacagtcactactccagttacaggcctccttgatcagctcacaatcccatttcagtcattcagtgggttaattggctag

SEQ ID NO: 760 - protein, 431 aa, Populus balsamifera subsp. trichocarpa
  misc_feature (1)..(431): Ceres GDNA ANNOT ID no. 1485236
  misc_feature (1)..(431)
  Functional Homolog of CDNA ID no. 12670870at SEQ ID no. 757with e-value of 7.9E-155 and percent identity of 70.63
MPSHFSYTFTPGTSSAYVTDTVTNTWMDTRIWSKLPQSLIDRVIAFLPPPAFFRARCVCKRWYSLLFSNNFLELYIQISPRRHWFLFFKHKSLKSYICGNNSNTTRGSGGQTSTTNIFEGYLFDPYDIAWYRISFPLVPSGFSPAAASGGLICWVSDEAGAKSIILCNPLIGSLSQLPPTLRPRLFPSTGLKVGPSSIDVAVAGDDLISPYAVKNLSTESFHIDAGGFYSLWGTTSSLPRLCSLESGQMVCVDDRFYCMNYNPFSVLAYEIAANSWCKIQAPMRRFLRSPSLVESMEKLILVAAVEKSKLNVPKSLRLWSLQACGTTWVEIERMPQQLYQQFEEMEAGHGFDCVGHGEFIAIIIRGSDKALLFDILRKAWQWIPPCPYMNHGGGGDDELHGFAYEPTVTTPVTGLLDQLTIPFQSFSGLIG

SEQ ID NO: 761 - protein, 422 aa, Medicago truncatula
  misc_feature (1)..(422): Public GI no. 60593177
  misc_feature (1)..(422)
  Functional Homolog of CDNA ID no. 12670870at SEQ ID no. 757with e-value of 2.5E-143 and percent identity of 68.00
  misc_feature (63)..(63): Xaa is any aa, unknown, or other
MEGFHPSMNMSMNMNMSMSMNPSFSYTFPITATASGVSTNITTAPYTTTSTTPWMNSRIWSKXPQRLLDRIIAFLPPPAFFRARSVCKRFYSLLFSNSFLELYLQVSPRFHWFIFFKHKTRSKTHIYKNSNNITDSTSFEGYLFDPNEMTWYRISFALIPSGFSPSSSSSGLVCFVSDESGPKTMLLSNPLLGSIAQLPPTLRPRLFPSIGLTITPSSIDVTVAGDDMISPYAVKNLTSESFHIDASGFYSIWGTTSSLPRLCSLESGRMVYSNGKFYCMNCSPFSVLAYDVATNAWFKIQAPMRRFLRSPNLVECKGKLLLVAAVEKSKLNVPKSLRVWCLQGCGSVWVESERMPQQLYVQFAEMENGNGFECVGNGEFIVIMIKGSDKGLVYDIGRKRWQWIPPCPYAGYDGFELHGFAY

SEQ ID NO: 762 - DNA, 1311 bp, Populus balsamifera subsp. trichocarpa
  misc_feature (1)..(1311): Ceres GDNA ANNOT ID no. 1446740
atggaaggtgctttcaacaatgctatgctcttacccttctcctacactttcactcctggcactagcagtactaatgttacagatagtgttaccagtccttggatggacaccaggatatggagcaaactcccacaaacgctgattgatcgtgttctcgcctttcttcctcctccagccttttttagagctcgttgtgtctgcaagagatggtatggtctcttgttctccaataattttcttgaactctatatccagatatcaccacgccgccattggttcctattcttcaagcacaaaagcctaaaaagctgcatctatagaaacaacaatagcaccagtgatagcggcggaaaaactatgacagccaatatttgtgaaggatacctctttgatccatatgatattgcatggtatagaatttctttttccttggttccatctgggttctctcctgctgctgcttctggtggcttaatatgttgggtctcagacgaggctggtgcaaagagtatcattttatgcaacccacttagtggttctctatctcagttgccaccaactttaaggccacgtctctttccttcaattggcttaaaagttgggccatcctcaattgatgtggctgttgcaggtgatgacttgatttctccatacgcagtcaagaatttatccactgaaagctttcatattgatgtcggtgggttttactcactatggggcactacttcttctcttccaaggctttgtagccttgaatcaggacaaatggtttgtgttgacgacagattctactgcatgaattacaacccgtttagcgttttggcttatgaaatagcagcaaacagttggtgcaagattcaagctccaatgcggagatttctacgctcgccaagattggttgagagcatgggaaaactcattcttgttgcagcagtggagaagagcaagctcaacgtgccaaagagcttgagactttggcgcttgcaaccttgtggaacaacatggatagagattgaaaggatgccacagcaactttacttacaatttgcggagctgggaggtggtcatgggtttgattgtgttgggcatggtgagtttattgctatcattatccgaggatcgatcaaggttttgttgtttgatatcttgagaaagatgtggcagtggattcctccttgttcttgcattgatggagtgggagatgatgatgatgaattgcatggttttgcttacgaacctacagtcaccaccccagttacaggcctccttgatcagatcacaattccaatattccagtcctttactagttaa

SEQ ID NO: 763 - protein, 428 aa, Populus balsamifera subsp. trichocarpa
  misc_feature (1)..(428): Ceres GDNA ANNOT ID no. 1446740
  misc_feature (1)..(428)
  Functional Homolog of CDNA ID no. 12670870at SEQ ID no. 757with e-value of 4.5E-152 and percent identity of 67.95
MLLPFSYTFTPGTSSTNVTDSVTSPWMDTRIWSKLPQTLIDRVLAFLPPPAFFRARCVCKRWYGLLFSNNFLELYIQISPRRHWFLFFKHKSLKSCIYRNNNSTSDSGGKTMTANICEGYLFDPYDIAWYRISFSLVPSGFSPAAASGGLICWVSDEAGAKSIILCNPLSGSLSQLPPTLRPRLFPSIGLKVGPSSIDVAVAGDDLISPYAVKNLSTESFHIDVGGFYSLWGTTSSLPRLCSLESGQMVCVDDRFYCMNYNPFSVLAYEIAANSWCKIQAPMRRFLRSPRLVESMGKLILVAAVEKSKLNVPKSLRLWRLQPCGTTWIEIERMPQQLYLQFAELGGGHGFDCVGHGEFIAIIIRGSIKVLLFDILRKMWQWIPPCSCIDGVGDDDDELHGFAYEPTVTTPVTGLLDQITIPIFQSFTS

SEQ ID NO: 764 - protein, 441 aa, Pisum sativum
  misc_feature (1)..(441): Public GI no. 30526087
  misc_feature (1)..(441)
  Functional Homolog of CDNA ID no. 12670870at SEQ ID no. 757with e-value of 0 and percent identity of 67.13
MEGFHPSMNMSMSMNMNPSFSYTFPITATASGAITNITTTTTTYNTTSTTPWMNSRIWSKLPHRLLDRIIAFLPPPAFFRARAVCKRFYSLLFSNSFLELYLQVSPRFHWFIFFKHKTRSKTHIYKNNTITDNNSFEGYIFDPNEVAWYRISFALIPSGFSPSSSSAGLLCWVSDESGPKTMLLSNPILGSITQLPPTLRPRLFPSIGLTITPSSIDVTAAGDDMISPYAVKNLSSESFHIDASGFYSIWGTTSSLPRLCSLESGRMVYSQGKFYCMNCSPFSVLAYDIATNTWFKIQAPMRRFLRSPNLVECKGKLLLVAAVEKSKLNVPKSLRVWSLQGCGSVWVETERMPQQLYVQFADMENGNGFECVGNGEFIVIMIKGSDKGLVYDIGRKRWQWIPPCPYAGYDGFELHGFAYDPRLATPVTALLDQLAMPLPQF

SEQ ID NO: 765 - protein, 449 aa, Lotus japonicus
  misc_feature (1)..(449): Public GI no. 28624856
  misc_feature (1)..(449)
  Functional Homolog of CDNA ID no. 12670870at SEQ ID no. 757with e-value of 0 and percent identity of 64.97
MEGFHPSMTMASPFPYTFPISAGGIGVGVVGVGSSNLTTPTPTATGTYNNTPWMNSRIWSKLPQKLLDRVIAFLPTPAFFRARSVCKRWYSLLFSNTFLELYLHLSPRRHWFIFFKHKTRKNYIYKNNNNNIITGSAGTASCEGYLFDPAEMAWYRISFAMIPPGFSPASSSAGLLCWASDEAGPKTMLLSNPILGSLTQLPPTLRPRLFPSIGLTITPTCIDVTVAGDDMISPYAVKNLTSESFHIDGGGFYSMWGTTSPLPRLCSLESGRMVCAEGKFYCMNCSPFSVLAYDIASTTWFKIQAPMRRFLRSPNLVECREKLMLVAAVEKSKLNVPRSLRVWTLQACGTMWVESERMPQQLYIQFAEIEGGNGFECVGHGEFVVIMIKGTDKALLYDLVRKRWQWIPPCPYAGYDGFELHGFAYEPRLATPVTALLDQLALPFQSYNA

SEQ ID NO: 766 - protein, 443 aa, Pisum sativum
  misc_feature (1)..(443): Public GI no. 30526089
  misc_feature (1)..(443)
  Functional Homolog of CDNA ID no. 12670870at SEQ ID no. 757with e-value of 0 and percent identity of 66.67
MEGFHPSMNMSMSMSMNMNPSFSYTFPITATASGAITNITTTTTTYNTTSTTPWMNSRIWSKLPHRLLDRIIAFLPPPAFFRARAVCKRFYSLLFSNSFLELYLQVSPRFHWFIFFKHKTRSKTHIYKNNTITDNNSFEGYIFDPNEVAWYRISFALIPSGFSPSSSSAGLLCWVSDESGPKTMLLSNPILGSITQLPPTLKPRLFPSIGLTITPSSIDVTAAGDDMISPYAVKNLSSESFHIDASGFYSIWGTTSSLPRLCSLESGRMVYSQGKFYCMNCSPFSVLAYDIATNTWFKIQAPMRRFLRSPNLVECNGKLLLVAAVEKSKLNVPKSLRVWSLQGCGSVWVETERMPQQLYVQFADMENGNGFECVGNGEFIVIMIKGSDKGLVYDIGRKRWQWIPPCPYAGYDGFELHGFAYDPRLATPVTALLDQLAMPLPQF

SEQ ID NO: 767 - protein, 443 aa, Pisum sativum
  misc_feature (1)..(443): Public GI no. 4101570
  misc_feature (1)..(443)
  Functional Homolog of CDNA ID no. 12670870at SEQ ID no. 757with e-value of 0 and percent identity of 66.20
MEGFHPSMNMSMSMSMNMNPSFSYTFPITATASGAITNITTTTTTYNTTSTTPWMNSRIWSKLPHRLLDRIIAFLPPPAFFRARAVCKRFYSLLFSNSFLELYLQVSPRFHWFIFFKHKTRSKTHIYKNNTITDNNSFEGYIFDPNEVAWYRISFALIPSGFSPSSSSAGLLCWVSDESGPKTMLLSNPILGSITQLPPTLRPRLFPSIGLTITPSSIDVTAAGDDMISPYAVKNLSSESFHIDASGFYSIWGTTSSLPRLCSLESGRMVYSQGKFYCMNCSPFSVLAYDIATNTWFKIQAPMRKFLRSPNLVECNGKLLLVAAVEKNKLNVPKNLRVWSLQGCGNVWVETERMPQQLYVQFADMENGNGFECVGNGEFIVIMIKGSDKGLVYDIGRKRWQWIPPCPYAGYDGFELHGFAYDPRLATPVTALLDQLAMPLPQF

SEQ ID NO: 768 - protein, 451 aa, Mimulus lewisii
  misc_feature (1)..(451): Public GI no. 42795315
  misc_feature (1)..(451)
  Functional Homolog of CDNA ID no. 12670870at SEQ ID no. 757with e-value of 0 and percent identity of 61.82
MDPFHSNTPMSIPIPYGFMTSNIPMSNTTTFSSSSMITHCTMSPRMDPRIWSRLPQRLIDRIIACLPPPAFFRARSVCKRWYSLIFSTTFLEFYLQVSPHRHWFLFFKQQSLKNYILKNNNSCTNNNNIGRAHCEGYLFDPDTFKWYRLSFPLIPTGFSPASSSGGLVCWVSEEGGSKSILLCNPLIGSLIQLPSTLRPRLCPSIGLTITNSSIDLAFAGDDMISPYAVKNLTSESFHIDGGGFYSIWGTTASLPRLCSLESGRMVHVGGRFYCMNYSPFSVLAYDISTNQWSKIQAPMRRFLRSPSLVESRGKLILVAAVEKSKLNVPKSMRLWTLQECGSMWVEIERMPQQLYSQFAEIEYGRGFSSVAHGEFVVIQLKGWADKALLFDFVGKKWSWIPPCPYIVNSGCVGVGGGREDELHGFPYDPRLAVPITALLEQLTLPFNSFAA

SEQ ID NO: 769 - protein, 429 aa, Antirrhinum majus
  misc_feature (1)..(429): Public GI no. 547307
  misc_feature (1)..(429)
  Functional Homolog of CDNA ID no. 12670870at SEQ ID no. 757with e-value of 1.2E-142 and percent identity of 63.55
MEAFQTPIFNLPLPYGFTTTPNTINLQNTMIMSTTNPWMDCRIWSRLPQKLIDRIIACLPPPAFFRSRSVCKRWYSLIFSTTFLELHLQASPIRHWFMFFKQQSIKHHIYNNNSTNARPTNYEGYLFDPQTLKWYRISFPLIPPGFSPASSSGGLICWVSEDSGPKNILLSNPLTNTAIQLPSTLEPRLCPTIGLTITNSSIDISFAGDDLISPYAVKNLTSESFHIDVGGFYSIWNTTSSLPRLCSLESGRMVHVQGRFYCMNYSPFSVLSYDISLNQWCKIQAPMRRFLRSPTLVESKGKLILVAAVEKSKLNVPKSLRLWALQECGTIWVEIERMPQQLYIQFAEIEGGRGFSCVAHAEFVVILIRGSYDKAVMFDFCRKQWVWVPPCPYVGGDDELHGFAYEPRLAVPITPLLEQLTLPFQSFTA

SEQ ID NO: 770 - protein, 443 aa, Mimulus guttatus
  misc_feature (1)..(443): Public GI no. 42795317
  misc_feature (1)..(443)
  Functional Homolog of CDNA ID no. 12670870at SEQ ID no. 757with e-value of 0 and percent identity of 60.92
MDPFHTSPISIPNIPYGFMNSIPITTNTSIMNPPRMDCRIWSRLPHRLIDRIIACLPPPAFFRARSVCKRWYSLIFSNTFLELYLQVSPHRHWFLFFKQQSLKNHILKNNSTTTSNNNNNTCCRAHCEGYLFDPDNLKWYRISFPLIPTGFSPASSSGGLICWVSEEGGSKSILLCNPLINSLVQLPSTLRPRLCPSIGLTITNSSIDLAFAGDDLISPYAVKNLTSESFHIDGGGFYSIWGTTASLPRLCSLESGRMVHVEGRFYCMNYSPFSVLGYDISMNEWSKIQAPMRRFLRSPSLVESRGKLILVAAVEKSKLNVPKSMRLWTLQECGSMWVEMERMPQQLYNQFAEIEDGRGFNSVAHGQFVVIQVKGSADKALLFDFVGKKWAWIPPCPYINMSSGGGGGGREDELHGFPYEPRLAVPITALLEQLTLPFTNFTA

SEQ ID NO: 771 - DNA, 1011 bp, Arabidopsis thaliana
  misc_feature (1)..(1011): Ceres CDNA ID no. 23495291
  misc_feature (1)..(1011): Also Known As  Ceres SEEDLINE ME11313
atgaaaaagcactcaaaggagaacgctctcgctcttcagcaggagactctcgaccttgagaaccctgaatcctctcctcgttcctccggccggagctgttcctctgctttctcgcgtctggttggtctccgatgtctcatcgttttggtcctaagctgtgcgattcttctctctgcgatcttctggctattccctcgtcgatcggtgtctgaattcaaagctgatgggacagttaaactcaatgcttcagtacaagcatcctttagacttcaaaaaccagtttctgaagttgttcgccataaaggaaagatagagcatgatatccttcggagcataggtctttcgaacaacagcaaggtgactgttctgtctctgaatcaatcaggtgcatctaactacacagacgtggagtttgcagttcttcctgtccctcctgaccatgaaataagcaaacactcgttaagcttactgcgatcgtcttttgttaagctgtttgctaaaagatcgaagctgaaactcaccacatcaggtttcgggaagccaacttcttttcaggttttgaaatttcctggaggaataactgtagatccactggaacctgcacctgtctctggagtagcactggttctgtttagtgttactatcaaaacttcgatatcaacagtacaagataggctggatctgctaaatggtctatttgagcatatgttgtctttggagccatatgagagtgttcatttccaactcacaaataaacaaggatctaccatatcaccaccgctaacttttcaggtttatgttgctttcaccatgagaaaatatcttcatcagagattgaaccattttactcagatcattcaaacatcccgtgctaaaaatctcggtctagacgaggcagtttttggtgaagtcaaggatataactttctcaacatacctggatggcaaagttcctgattctgatttggaattggcaccagcgccaactccttgcttatcttctctgtgttga

SEQ ID NO: 772 - protein, 336 aa, Arabidopsis thaliana
  misc_feature (1)..(336): Ceres CDNA ID no. 23495291
  misc_feature (1)..(336): Also Known As  Ceres SEEDLINE ME11313
  misc_feature: Phenotype: Short Useful for making shorter plants
  misc_feature: Phenotype: Reduced fertility Useful for sterility, genetic confinement systems
MKKHSKENALALQQETLDLENPESSPRSSGRSCSSAFSRLVGLRCLIVLVLSCAILLSAIFWLFPRRSVSEFKADGTVKLNASVQASFRLQKPVSEVVRHKGKIEHDILRSIGLSNNSKVTVLSLNQSGASNYTDVEFAVLPVPPDHEISKHSLSLLRSSFVKLFAKRSKLKLTTSGFGKPTSFQVLKFPGGITVDPLEPAPVSGVALVLFSVTIKTSISTVQDRLDLLNGLFEHMLSLEPYESVHFQLTNKQGSTISPPLTFQVYVAFTMRKYLHQRLNHFTQIIQTSRAKNLGLDEAVFGEVKDITFSTYLDGKVPDSDLELAPAPTPCLSSLC

SEQ ID NO: 773 - DNA, 1593 bp, Populus balsamifera subsp. trichocarpa
  misc_feature (1)..(1593): Ceres GDNA ANNOT ID no. 1439158
atggagagggcatcgacacttgtctttaagtacattctcccatctcctccaccagtcccactactccacttttgtccagggaaaccaagtgggtttttagagagagaaaaacgagtgacagatgcaatttcttcaatggggaaaggagattcttcttataatcaggagcagcagcagaggcatgatgatgatgatgatgatgagaggagaaccagaagattgttcctttgtgagagatgttcgatgggactttcaagaatcagttttaaatgtgttttcattttgatgttgagtttgtgccttttggtctctgctctcttttggatctttcctttacattcttctctacattcagttagcgggttcgatgctaaagatgaagttaaactcagtgctacagtacaagcatacttcagacttctaaagccagtggtgcagcttgttacacacattgcaagattagaatatgatatcaatgaagaaataggcatcccaaacgcaaaggtggctgttctatccatgcaccgattagcttctaattggactgatgtggtgtttggttttattcctgatccagtaaatgtcccaataaacatggtgtccttaagtgtgctgaggtcgtcactggttgatctgttccttgagcaatccaatttgactgtgactacattgatttttgggcaaccatctacatttgaaatttttaggtttcctgggggaatcactatagtaccgatgcaatatgcttcaatctggcagatgccccagattctctttaattttactcttaacaattccatatctgaagttctggacaatttcggagacttaaaagatcagttggaatttgggttgcacctaaggcaatttgagactgtgtatgtgaagataacaaatgaggatggttccacaataactcccccagtcacagttcaggtttcagtcatgtcggatctggggacccttcagctacagaggttgaagcagttggctcaaataatcacagcttctcctgtaaaaaatcttggcctcaacaactcggtcttcggcaaagtaaagagtgttgttttgtcatcatatttaaaggatacgcttcatggaactcctcctactccttcaccagcaatttctccatctctccctccagcaattgctccatttgctcctgtaaattcccctgcaccttctgtgatacctgctctccctcctcagccctgtccacaacatagttctgcaactccgccaagcaactctccatctggttctaaccaaactcctcgtttacatccagagcccccagatgtgtctcctttacctggagtatactatggttctggtccagggaaaggtccattattgtcacttgcaccatccacattggctcaaacgccatcatttaacaagcagggcactgctgataatttcgatgtgtttatatacttttgcacaagtcttcgtattattctaagcaaggcaatagacaaaaatgcaaatgagctaaaaagatggaatgcaggtcaaagccataaaggtggcaggcctctcatccccacttctaggatttttgttatcccaagaaatatgggaagttaa

SEQ ID NO: 774 - protein, 485 aa, Populus balsamifera subsp. trichocarpa
  misc_feature (1)..(485): Ceres GDNA ANNOT ID no. 1439158
  misc_feature (1)..(485)
  Functional Homolog of CDNA ID no. 23495291at SEQ ID no. 772with e-value of 1.4E-56 and percent identity of 44.44
MGKGDSSYNQEQQQRHDDDDDDERRTRRLFLCERCSMGLSRISFKCVFILMLSLCLLVSALFWIFPLHSSLHSVSGFDAKDEVKLSATVQAYFRLLKPVVQLVTHIARLEYDINEEIGIPNAKVAVLSMHRLASNWTDVVFGFIPDPVNVPINMVSLSVLRSSLVDLFLEQSNLTVTTLIFGQPSTFEIFRFPGGITIVPMQYASIWQMPQILFNFTLNNSISEVLDNFGDLKDQLEFGLHLRQFETVYVKITNEDGSTITPPVTVQVSVMSDLGTLQLQRLKQLAQIITASPVKNLGLNNSVFGKVKSVVLSSYLKDTLHGTPPTPSPAISPSLPPAIAPFAPVNSPAPSVIPALPPQPCPQHSSATPPSNSPSGSNQTPRLHPEPPDVSPLPGVYYGSGPGKGPLLSLAPSTLAQTPSFNKQGTADNFDVFIYFCTSLRIILSKAIDKNANELKRWNAGQSHKGGRPLIPTSRIFVIPRNMGS

SEQ ID NO: 775 - DNA, 1458 bp, Populus balsamifera subsp. trichocarpa
  misc_feature (1)..(1458): Ceres GDNA ANNOT ID no. 1492026
atggggaaaggagattcttcttataatcaggagcagcagcagaggcatgatgatgatgatgatgatgagaggagaaccagaagattgttcctttgtgagagatgttcgatgggactttcaagaatcagttttaaatgtgttttcattttgatgttgagtttgtgccttttggtctctgctctcttttggatctttcctttacattcttctctacattcagttagcgggttcgatgctaaagatgaagttaaactcagtgctacagtacaagcatacttcagacttctaaagccagtggtgcagcttgttacacacattgcaagattagaatatgatatcaatgaagaaataggcatcccaaacgcaaaggtggctgttctatccatgcaccgattagcttctaattggactgatgtggtgtttggttttattcctgatccagtaaatgtcccaataaacatggtgtccttaagtgtgctgaggtcgtcactggttgatctgttccttgagcaatccaatttgactgtgactacattgatttttgggcaaccatctacatttgaaatttttaggtttcctgggggaatcactatagtaccgatgcaatatgcttcaatctggcagatgccccagattctctttaattttactcttaacaattccatatctgaagttctggacaatttcggagacttaaaagatcagttggaatttgggttgcacctaaggcaatttgagactgtgtatgtgaagataacaaatgaggatggttccacaataactcccccagtcacagttcaggtttcagtcatgtcggatctggggacccttcagctacagaggttgaagcagttggctcaaataatcacagcttctcctgtaaaaaatcttggcctcaacaactcggtcttcggcaaagtaaagagtgttgttttgtcatcatatttaaaggatacgcttcatggaactcctcctactccttcaccagcaatttctccatctctccctccagcaattgctccatttgctcctgtaaattcccctgcaccttctgtgatacctgctctccctcctcagccctgtccacaacatagttctgcaactccgccaagcaactctccatctggttctaaccaaactcctcgtttacatccagagcccccagatgtgtctcctttacctggagtatactatggttctggtccagggaaaggtccattattgtcacttgcaccatccacattggctcaaacgccatcatttaacaagcagggcactgctgataatttcgatgtgtttatatacttttgcacaagtcttcgtattattctaagcaaggcaatagacaaaaatgcaaatgagctaaaaagatggaatgcaggtcaaagccataaaggtggcaggcctctcatccccacttctaggatttttgttatcccaagaaatatgggaagttaa

SEQ ID NO: 776 - protein, 449 aa, Populus balsamifera subsp. trichocarpa
  misc_feature (1)..(449): Ceres GDNA ANNOT ID no. 1492026
  misc_feature (1)..(449)
  Functional Homolog of CDNA ID no. 23495291at SEQ ID no. 772with e-value of 2.6E-55 and percent identity of 44.14
MGLSRISFKCVFILMLSLCLLVSALFWIFPLHSSLHSVSGFDAKDEVKLSATVQAYFRLLKPVVQLVTHIARLEYDINEEIGIPNAKVAVLSMHRLASNWTDVVFGFIPDPVNVPINMVSLSVLRSSLVDLFLEQSNLTVTTLIFGQPSTFEIFRFPGGITIVPMQYASIWQMPQILFNFTLNNSISEVLDNFGDLKDQLEFGLHLRQFETVYVKITNEDGSTITPPVTVQVSVMSDLGTLQLQRLKQLAQIITASPVKNLGLNNSVFGKVKSVVLSSYLKDTLHGTPPTPSPAISPSLPPAIAPFAPVNSPAPSVIPALPPQPCPQHSSATPPSNSPSGSNQTPRLHPEPPDVSPLPGVYYGSGPGKGPLLSLAPSTLAQTPSFNKQGTADNFDVFIYFCTSLRIILSKAIDKNANELKRWNAGQSHKGGRPLIPTSRIFVIPRNMGS

SEQ ID NO: 777 - protein, 516 aa, Triticum aestivum
  misc_feature (1)..(516): Ceres CLONE ID no. 928574
  misc_feature (1)..(516)
  Functional Homolog of CDNA ID no. 23495291at SEQ ID no. 772with e-value of 3.4E-44 and percent identity of 39.87
MGKAAGGQREQPPGAAAEVEGEGRRRGRSCSSCRRSVRPQCVAALLLGAAVLLSALFWLPPFAGRDRGRRAGPPDPPADALAADIVASFMLQKTVSELNESIPKLEFDIYEEIGIPNSTVAVNFLQPSGASNWTNVIFSVVPYPKYSTMSSTWLSILRSHFMSLVVQQSTLQLTESLFGNSSFFEVLKFPGGITIIPPQAAFLVQKPYASFNFTLNFSIDKVQDKTNELKDQMRAGLLLDTNEILYIKLTNLEGSTVAPPTVVRSSIILEVGNHQPSPPRMKQLAQTIANSSSGNLGLNHTVFGKVKQLSLSSYLRHSLHSGSDSDAPSPAPMTHEDHRRHHHHHHHHHHHHHHHHHHHHSHHRSHEVIRQLPPSPAPVHPPVEQPKYRSPSPSGYSYGYTNKPKNKAPVAPAAEPVVRNHHYASPPTMPHAVSPSSVSPSPSARHPTNIPNRHHSSPAPSPANVKPPLHTVSLAHAHHPAQVPAVAPAPSTSFATRRHSCQWALAILLCLLAGLP

SEQ ID NO: 778 - protein, 513 aa, Oryza sativa subsp. japonica
  misc_feature (1)..(513): Public GI no. 57900395
  misc_feature (1)..(513)
  Functional Homolog of CDNA ID no. 23495291at SEQ ID no. 772with e-value of 2.7E-44 and percent identity of 39.19
MGKEAVGEGQHQQQRPPDGAGGGGGGRGGRGGGGGRGGSGRLGWWWCCCCGVGGVVRLKCVAALVLGVAVLLSAVFWLPPFARRGRGSEGPDPGAGFDADIVASFRLHKMVPELNGNASKLELDIYEEIGIPNSTVVVNSLQLVGSNWTNVIFSIVPYPKNLTLSSTGLSILRSYFMSFVVRQSTLQLTESLFGNSSSFEVLKFPGGITIIPPQTAFLPQKPHATFNFTLNFPIYKVQDRIDELKDQMKTGLLLNSYENLYIKLANLNGSTVDPPTIVETSIFLEVGNHQPSVPRMKQLAQTITNSSSGNLGLNHTVFGRVKQISLSSYLRHSLHSGGGSEAPSPAPMHHHGHHHHHHHHHGHEDSRHSAPAQAPVHYPVHEPRYGAPPPSRCPYGTDKPKNKAHVMPAPEPTANGHHFASPVALPPHSLSPRNPNVHSRSPIPSPPVLPEPPLPTVSFAHAHPPSEHTSRRDPAGLSALAPAPHSSNATRSLWRSIHWANIVPLVCILMSLL

SEQ ID NO: 779 - DNA, 1278 bp, Arabidopsis thaliana
  misc_feature (1)..(1278): Ceres CDNA ID no. 13612399
  misc_feature (1)..(1278): Also Known As  Ceres SEEDLINE ME11355
atcctttctctctgtatctctgtgtattcttctctcatggagcctgctcatatcgattggaagagaatcgattctcgttttgttgaagacgttttttacgaacacatcagagctcctaaatggttcgatttcttggcccctacccattttgactccattgacgacgatgcttggttctgcaaacctgaatgtaatcatcccaagagacctgaggactttttctcaacgccgacttcttccaagcatccaagtctgagggatacgaatgagactctaacagagcagaatcagaggaggaggggatatgctttatcaccttctactccaaacaaccaagaaagtgaaaatcagaacccgaacttagccacacctccaagctaccaagcaaaatcatggagagcagcaattaaatcaacttctgtcaagaagatgaataaagaagttccaagactaaagagcacacaatcagctagaaatctgttttcagggagagacatatttggtcatatctcagatttctgctatgaattgaagagattagccacaagggttactgagagagaagatactgggaaatctgaagtgaaggagagtcatcaagtgggtgaaatagtaaatcagccttactctgttcatgacttggaattgaaaaaggaaagaaagccactgcttgaagtaagcaaagataagctccctgagtccacggatgttaaaggaagcacatttaaagagaaccgtagaagaaagaagagagtggatgatgcagagaacattcctgtctcacttaatgtggagactgtaaaaaacaaaggagaggagggtagaagaaagaagagaatggatgatgcagagaacatcccagttcctctaaaactggagactataaagaacaaaggacacgaacgattcctgcagcaaatcaggacaaacccaccatctcctcaatgcttctctgagaaccggacagctacattgaaacccttgaggaccaaacctacggaagtgttgaagagaaaggaagatgaagctgaagaagaaaagaacagaaagagtggagaaagcaaagaagcaacaaggggattggacgttctctggttcttaaagccttgcactttagccaactagaaaaccttcaccaaattctttctatattgattcattcttttgttaatttcattttattcaactgtaactaacgagatgattatcttgctcagatatataattctgggcaaatttgattcaatctcttacttttacacatacaacgatttgttt

SEQ ID NO: 780 - protein, 362 aa, Arabidopsis thaliana
  misc_feature (1)..(362): Ceres CDNA ID no. 13612399
  misc_feature (1)..(362): Also Known As  Ceres SEEDLINE ME11355
  misc_feature: Phenotype: Late Flowering Useful for delaying flowering time
MEPAHIDWKRIDSRFVEDVFYEHIRAPKWFDFLAPTHFDSIDDDAWFCKPECNHPKRPEDFFSTPTSSKHPSLRDTNETLTEQNQRRRGYALSPSTPNNQESENQNPNLATPPSYQAKSWRAAIKSTSVKKMNKEVPRLKSTQSARNLFSGRDIFGHISDFCYELKRLATRVTEREDTGKSEVKESHQVGEIVNQPYSVHDLELKKERKPLLEVSKDKLPESTDVKGSTFKENRRRKKRVDDAENIPVSLNVETVKNKGEEGRRKKRMDDAENIPVPLKLETIKNKGHERFLQQIRTNPPSPQCFSENRTATLKPLRTKPTEVLKRKEDEAEEEKNRKSGESKEATRGLDVLWFLKPCTLAN

SEQ ID NO: 781 - protein, 358 aa, Glycine max
  misc_feature (1)..(358): Ceres CLONE ID no. 473933
  misc_feature (1)..(358)
  Functional Homolog of CDNA ID no. 13612399at SEQ ID no. 780with e-value of 8.5E-60 and percent identity of 49.85
MEPAKIDWKRLEWSFVEDKLYEHINAPKWVDFLSLDHSLNDHADEAWFCKPDCKHPKTAEDFLRSKTPPSKKGFSPGYVSENLPSGDKIRRDAKIKRRVPALFNQESENQNPNLFTPPPTTKVNPLKEAIKSTEEKKKVVDNDDTFVDHKAPSLRSTLSTKNLFAGRPILNQITEFCNELKKLAIRAKERENAENLIPKESEEVVEKTSCSIQALAESDTKEKERKPLLEVSKAERIEGMCVKGKQQRKKRPDEAENMPVTLDLENLKHKREGSLQQIRTNPPSPQCFSVARGFNKPTPSKAPKSRLMERGILGEIEQNKEIVKESPAEKSRSTSIVDGRETKALDMFWFLKPCTLSG

SEQ ID NO: 782 - protein, 245 aa, Glycine max
  misc_feature (1)..(245): Ceres CLONE ID no. 1653608
  misc_feature (1)..(245)
  Functional Homolog of CDNA ID no. 13612399at SEQ ID no. 780with e-value of 1.4E-24 and percent identity of 47.76
MEPDNIDWDNIDSTFSQDDTYENFGAPMWVDLSAFDESLVDDEAWFCTHDCKHPKTAEDFLKPTTTRKSKAKLLRFATISEILPFRDRDLRENSSILESSYAKSSERSRRPSCSGSFYEDSENRNPNFSAPLPNGRTNKLKKPLIKTNKANSKQMNNGPVECPVKSSNKKPQLKSTFSAQNLLGGREILSQISGFCSELKRLATRGRKGTSLQSGVSEEVKECVVHRERVPLLVVKDSRKGQTLE

SEQ ID NO: 783 - protein, 384 aa, Zea mays
  misc_feature (1)..(384): Ceres CLONE ID no. 398141
  misc_feature (1)..(384)
  Functional Homolog of CDNA ID no. 13612399at SEQ ID no. 780with e-value of 6.5E-30 and percent identity of 35.63
MEFLEPKDIDWSRVVSQYVRDETYEGIEAPHWADLSDPNAGRAAVDDEAWFCRPDCQHPKTAEDFFKLSPSPKGKLLRSVSAMLPFAERDANATSLRDGSSNLKWRGGGAVAASTPPKPKAAPKKRFQEDSENHDPALATPPPRQAPSRPPFGAPRWNKNAKEAIKSSAEKRPDNAEKEALLNKHVPPRQLKSTLSARNLFSGKDILGQISEFYDELKRMVGGGVGRPVTDTQEEHSSDPVNPSYLMEKVAPDETVKEEARQETVKKSPSPMKGKKVGLKVEPGKQRSPSVLKEVRATPPTPQRFLSPSPNRIKNVKPGGITAGSPLKKAPKEKGTPSKDLESKKDAVRQPFGVKDMNNTRACDAEGSSSSMFWFLKPCTFLVE

SEQ ID NO: 784 - DNA, 1164 bp, Arabidopsis thaliana
  misc_feature (1)..(1164): Ceres CDNA ID no. 23522373
  misc_feature (1)..(1164): Also Known As  Ceres SEEDLINE ME11468
atgggtagcagtgagatggaaaaatcaggtaaagagaaagaacctaagactacaccgccttcgacttcttcatctgctcctgctactgttgtttcacaggaaccttcttctgctgtgagtgctggagtggctgttactcaagattggtctggcttccaggcttattctcctatgccgcctcatggttatgtagcatcaagtcctcaacctcatccttatatgtggggcgttcagcatatgatgccgccttatggaacaccgcctcatccgtatgttacgatgtatcctccaggtggcatgtatgctcatccttcattacctccggggtcttatccatatagtccctatgcaatgccttctcctaatggaatggctgaagcttctggtaatactggaagtgttattgagggtgatggtaaaccatctgatgggaaggaaaaattgccaatcaaaagatcaaaaggaagcttgggaagtttgaatatgattataggaaagaacaatgaagctggaaaaaactcaggagcatcagctaatggagcttgttctaaaagtgctgagagcggttctgatggatcaagtgacggaagtgatgcaaattcacaaaacgactctggctctagacacaacgggaaggatggtgaaacagcttcagagagtggtggttctgctcatggaccaccccgtaatggaagtaatctaccagtgaaccagaccgtcgctatcatgccagtgtcggctacaggtgttccaggcccaccaacaaatctaaatatcggaatggattattggagcggtcatgggaatgtttctggagcagttcctggagttgtagtagatggttcccaatcacagccatggttacaggatgagagagagattaagcgacagagacggaagcaatccaatagggaatctgctcgtagatccaggttgcgtaaacaggcggagtgtgatgagctagcacaacgagcagaggttttgaatggagagaactcaagtcttagagcagaaattaacaagcttaaaagccaatatgaagagcttcttgctgaaaatagctctctcaagaataagttctcgtcagccccgtcactggaaggtggagacttggacaagaacgagcaagaaccacagagaagtacacgtcaggatgttgcgtag

SEQ ID NO: 785 - protein, 387 aa, Arabidopsis thaliana
  misc_feature (1)..(387): Ceres CDNA ID no. 23522373
  misc_feature (1)..(387): Also Known As  Ceres SEEDLINE ME11468
  misc_feature (1)..(205): Pfam Name: MFMR Pfam Description: G-box binding protein MFMR
  misc_feature (326)..(365): Pfam Name: bZIP_Maf Pfam Description: bZIP Maf transcription factor
  misc_feature: Phenotype: Yellow-Green Viable 3 Useful for making lethal plants for genetic confinement systems
  misc_feature: Phenotype: Low Nitrate Useful for making plants tolerant to low nitrogen
MGSSEMEKSGKEKEPKTTPPSTSSSAPATVVSQEPSSAVSAGVAVTQDWSGFQAYSPMPPHGYVASSPQPHPYMWGVQHMMPPYGTPPHPYVTMYPPGGMYAHPSLPPGSYPYSPYAMPSPNGMAEASGNTGSVIEGDGKPSDGKEKLPIKRSKGSLGSLNMIIGKNNEAGKNSGASANGACSKSAESGSDGSSDGSDANSQNDSGSRHNGKDGETASESGGSAHGPPRNGSNLPVNQTVAIMPVSATGVPGPPTNLNIGMDYWSGHGNVSGAVPGVVVDGSQSQPWLQDEREIKRQRRKQSNRESARRSRLRKQAECDELAQRAEVLNGENSSLRAEINKLKSQYEELLAENSSLKNKFSSAPSLEGGDLDKNEQEPQRSTRQDVA

SEQ ID NO: 786 - protein, 404 aa, Zea mays
  misc_feature (1)..(404): Ceres CLONE ID no. 1221348
  misc_feature (1)..(404)
  Functional Homolog of CDNA ID no. 23522373at SEQ ID no. 785with e-value of 4.7E-150 and percent identity of 80.65
MEKSSKEKEPKTPPPSSTAPPSSQEPSSAVSAGMATPDWSGFQAYSPMPPPHGYVASSPQPHPYMWGVQHMMPPYGTPPHPYVAMYPPGGMYAHPSMPPGSYPYSPYAMPSPNGMTEVSGNTTGGTDGDAKQSEVKEKLPIKRSRGSLGSLNMITGKNNEPGKNSGASANGAYSKSGESASDGSSEGSDGNSQNDSGSGLDGKDAEAASENGGSANGPQNGSAGTPILPVSQTVPIMPMTAAGVPGPPTNLNIGMDYWGAPTSAGIPGMHGKVSTPVPGVVAPGSRDGGHSQPWLQDDRELKRQRRKQSNRESARRSRLRKQAECDELAQRAEVLNEENTNLRAEINKLKSQCEELTTENTSLKDQLSLFPPLEGISMDNDHQEPDTNQTGAAERKVDSYKDST

SEQ ID NO: 787 - DNA, 1155 bp, Populus balsamifera subsp. trichocarpa
  misc_feature (1)..(1155): Ceres GDNA ANNOT ID no. 1538994
atggttagcagtgatatggataaaactgggaaggaaaaggaggccaagccaccatctgctgctcctacacaggagcagccttcaactgccagtgctacaactgtaaatccagactggtctgggtttcaggcatattctcctatacctccacctgggttcttggcatcaagtccccaagctcacccgtatatgtggggggttcagcacatcatgcctccctatggtaccccaccacatccatatgtggcaatgtatccgcatggtgtatatgctcatccatccattcctccgggttcttatccttttagtccttttgcaatgccttctccaaatggtattgctgaggcttctggaaacactcctggcagcatggaagcagatggtaggccatctgatgctaaggaaaaactgccaattaaaagatcgaaaggaagtttgggcagtttaaacatgatcactgggaagaacaatgagcatggtaaaacaacaggagtgtctgccaacggagcttattctaagagtgctgagagtggtagtgaaggctccagtgaaggaagtgatgcaaattctcagagtgactcacaaatgaagtcaggtggcaggcaagattctctggaagcacatggtgctcagaatggaggacagggtgcatctaatacgatcatgaatcaaacgatggctatcatgccaatatctgctgccagtgctccaggagctatacctggccccacaaccaacttaaatattggaatggactactggggagcccctgcttcatctactgttcctgcaattcgtgggaaagttccttctactccagttgctggaggggtagtttctactggatcacgggatggtgttcaatcgcagatttggttacaggatgaaagagagcttaagagacagagaaggaagcagtcaaacagagaatccgctcgccggtccaggttgcgtaaacaggctgaatgtgatgaactggcccaacgtgctgaagccttaaaagaagaaaatgccaatcttagatcagaagtaaaccaaatcaagagcgagtatgagcaacttcttgcggagaacgcctctctcaaggaagattttagggctggcaggaatgaccaacatatgagcaatgatacacaacagactggacaaacatag

SEQ ID NO: 788 - protein, 379 aa, Populus balsamifera subsp. trichocarpa
  misc_feature (1)..(379): Ceres GDNA ANNOT ID no. 1538994
  misc_feature (1)..(379)
  Functional Homolog of CDNA ID no. 23522373at SEQ ID no. 785with e-value of 3.6E-120 and percent identity of 71.26
MDKTGKEKEAKPPSAAPTQEQPSTASATTVNPDWSGFQAYSPIPPPGFLASSPQAHPYMWGVQHIMPPYGTPPHPYVAMYPHGVYAHPSIPPGSYPFSPFAMPSPNGIAEASGNTPGSMEADGRPSDAKEKLPIKRSKGSLGSLNMITGKNNEHGKTTGVSANGAYSKSAESGSEGSSEGSDANSQSDSQMKSGGRQDSLEAHGAQNGGQGASNTIMNQTMAIMPISAASAPGAIPGPTTNLNIGMDYWGAPASSTVPAIRGKVPSTPVAGGVVSTGSRDGVQSQIWLQDERELKRQRRKQSNRESARRSRLRKQAECDELAQRAEALKEENANLRSEVNQIKSEYEQLLAENASLKEDFRAGRNDQHMSNDTQQTGQT

SEQ ID NO: 789 - protein, 407 aa, Petroselinum crispum
  misc_feature (1)..(407): Public GI no. 3336903
  misc_feature (1)..(407)
  Functional Homolog of CDNA ID no. 23522373at SEQ ID no. 785with e-value of 6.4E-118 and percent identity of 64.19
MGSSEMEKSSKETKEPKTPTSQEQVSPVVAGPAGPVTPDWSGFQAYSPMPPHGYMASSPQAPHPYMWGVQHMMPPYGTPPHPYVMYPHGGIYAHPSMPPGSYPFSPFAMPSPNGVAAEASGNTPGSMEADGGKVSEGKEKLPIKRSKGSLGSLNMITGKTNEASKPSGAATNGGYSKSGESASEGSSEEGSDANSQNDSQIKSGSRQDSLEAGASHNGNAHGLQNGQYANNSMVNQPISVVPLSTAGPTAVLPGPATNLNIGMDYWGGATSSAIPAMRGQVSPPITGGTVSAGARDNVQSQLWLQDERELKRQKRKQSNRESARRSRLRKQAECDELAQRAEALKEENASLRAELSRFRTEYEKIVAQNEVLKEKIREVPGQEDQWPGRNDQHNGNGSRETGHTEPA

SEQ ID NO: 790 - DNA, 1170 bp, Populus balsamifera subsp. trichocarpa
  misc_feature (1)..(1170): Ceres GDNA ANNOT ID no. 1500081
atgggtagcagtgatatggataaaacaggaaaggagaaggaggccaagacaccatctgctgcttctacacaggaacagccttcaactgccggtgctgccactgtaaatccagactggtctgggtttcaggcctattctcatatacctccaccagggttcttggcatcaagtccccaagctcacccatatatgtggggggttcagcacattatgcctccctatggtaccccaccacatccatatgttgcaatgtatcctcacggtgtatatgctcatccgtccattcccccgggttcttatccttttagtccttttgcaatgccttctccaaatggtatcgctgaggtttctggaaacactcctggcagcatggaagccgaaggaagaccatctgatgccaaggaaaaattacctattaaaaggtccaaaggaagcttgggcagtttaaacatgattactgggaagaataatgagcatgggagaacaacaggagcatctgctaatggagcttattcgaaaagtgctgagagtggaagtgaaggcacaagtgaaggaagtgatgcggattctcagagtgactcacaaatgaagtcaggtggcagacaagattctctggaagaaacatctcagaatggtggttctgcacatgctgctcagaatggaggacagggtgcatctacaatcatgaatcaaacaatgggtgtcctgccaatatctgctgccagtgcccctggagttatacctggtcccacaaccaacttaaatattggaatggactattggggagcccctgttgcttctagtgttcctgcaattcgtgggaaggttccttctactccagttgctggagggattgctactgctggatcacgggatggtgttcaatcgcagcattggttacaggatgaaagagagcttaagagacagagaaggaagcagtcaaacagagaatctgctcgccggtccaggttgcgtaaacagctacgtgctcctatatcaattcattggcttgcatgcatgcttttgagtcaggctgaatgcgatgagctggcccaacgtgctgaagttttaaaagaagaaaatgccaatcttagatcagaagtaaatcggatcaagagcgagtatgagcagcttcttgcagagaacgcctctctcaagggtggtctctag

SEQ ID NO: 791 - protein, 384 aa, Populus balsamifera subsp. trichocarpa
  misc_feature (1)..(384): Ceres GDNA ANNOT ID no. 1500081
  misc_feature (1)..(384)
  Functional Homolog of CDNA ID no. 23522373at SEQ ID no. 785with e-value of 1E-113 and percent identity of 69.50
MDKTGKEKEAKTPSAASTQEQPSTAGAATVNPDWSGFQAYSHIPPPGFLASSPQAHPYMWGVQHIMPPYGTPPHPYVAMYPHGVYAHPSIPPGSYPFSPFAMPSPNGIAEVSGNTPGSMEAEGRPSDAKEKLPIKRSKGSLGSLNMITGKNNEHGRTTGASANGAYSKSAESGSEGTSEGSDADSQSDSQMKSGGRQDSLEETSQNGGSAHAAQNGGQGASTIMNQTMGVLPISAASAPGVIPGPTTNLNIGMDYWGAPVASSVPAIRGKVPSTPVAGGIATAGSRDGVQSQHWLQDERELKRQRRKQSNRESARRSRLRKQLRAPISIHWLACMLLSQAECDELAQRAEVLKEENANLRSEVNRIKSEYEQLLAENASLKGGL

SEQ ID NO: 792 - protein, 414 aa, Glycine max
  misc_feature (1)..(414): Ceres CLONE ID no. 545441
  misc_feature (1)..(414)
  Functional Homolog of CDNA ID no. 23522373at SEQ ID no. 785with e-value of 3E-123 and percent identity of 68.66
MGSSEMDKTTKEKESKTPPPPTSQEQSSTTGTGTINPEWPGFQAYSPIPPHGFLASSPQAHPYMWGVQQFMPPYGTPPHPYVAMYPPGGIYAHPSMPPGSYPFNPFAMPSPNGIAEASGNTPGSMEADGKPSEVKEKLPIKRSKGSLGSLNMITGKNNEHGKTLGTSANGIHSKSGESASEGEGTSEGSDANSQNDSQLKSGGRQDSFEDEPSQNGSSAYTPQNGGLNIPHTVVNQTMSIIPISAGGAPGAVPGPTTNLNIGMDYWGTPGSSNIPGLGRKVPSTAVAGGMVTVGSRDSAQSQLWLQDERELKRQRRKQSNRESARRSRLRKQAECDELAQRAEALKEENASLRSEVNRIRSDYEQLLSENAALKERLGELPPNDDHHHRSGRNDQHVGNDTQQSGQTEAVQGGH

SEQ ID NO: 793 - protein, 394 aa, Catharanthus roseus
  misc_feature (1)..(394): Public GI no. 5381313
  misc_feature (1)..(394)
  Functional Homolog of CDNA ID no. 23522373at SEQ ID no. 785with e-value of 3.6E-124 and percent identity of 64.99
MGSSEIDKSSKEAKEAKEAKETPPSSQEQPAATSAGTPDWTGFQAYSPIPPHGFLASSPQAHPYMWGVQHLMPPYGTPPHPYVAMYPHGGIYAHPSIPPGSYPFSPFAMPSPNGIAEPSVNTPGNMEVDGKASEGKEKLPIKRSRGSLGSLNMITGKNNDAGKTSGASANGACSKSAESASEGSSEGSDANSQNESQMKSGNRQDSGETSQNGSGAHGSQNGGTNTPHSMVAMVPLSASGGVTGPATNLNIGMDYWGTAASPTVPVVRGKVPSTPVGGGMVPARDPVQAQLWIQDERELKRQRRKQSNRESARRSRLRKQAECDELAQRAEALKEENNSLRAEVSLIRSEYEQLLAQNAALKERLGEASGQDDPRSSRNEQQHSVQRETAARSQ

SEQ ID NO: 794 - protein, 420 aa, Petroselinum crispum
  misc_feature (1)..(420): Public GI no. 3336906
  misc_feature (1)..(420)
  Functional Homolog of CDNA ID no. 23522373at SEQ ID no. 785with e-value of 7.9E-120 and percent identity of 64.84
MGSSGMDKSPKDIKEAKEPKIPTSQEQPSPAAAAAAAAAAAAAAGPVTPDWSGFQAYSPMPPHGYMASSPQAPHPYMWGVQHMMPPYGTPPHPYVMYPHGGIYAHPSMPPGSYPFSPFAIPSPNGVAEAFGNTPGSTEADGKVSEGKEKLPIKRSKGSLGSLNMITGKNNEASKTLGAAANGGYSKSGDSASDGSSEEGSDANSQNDSQIKSGSRQDSLEGESQNGNAHGLQNGQNANHSMVNQQISIVPITAAGTAGAIPGPMTNLNIGMDYWGGVTSSAVPAMRGKVTSPPITGGIVTAGARDNVQSQLWLQDERELKRQRRKQSNRESARRSRLRKQAECDELAQRAEVLQEENASLRAELGRARSEYEKALAQNAILKEKVGDVAGQEDQWPGRNDQHTGDEGQETGHIEPGQSGH

SEQ ID NO: 795 - protein, 397 aa, Phaseolus vulgaris
  misc_feature (1)..(397): Public GI no. 13775109
  misc_feature (1)..(397)
  Functional Homolog of CDNA ID no. 23522373at SEQ ID no. 785with e-value of 3.8E-120 and percent identity of 64.63
MGSSEMDKTPKEKESKTPPPTSQEQSSTTATGTINPDWPGFQAYSPIPPHGFLASSPQAHPYMWGVQQFMPPYGTPPHPYVAMYPPGGIYAHPSMPPGSYPFSPFAMPSPNGIAEASGNTPGSMEADGKPPEVKEKLPIKRSKGSLGSLNMITGKNNEHGKTRGTSANGIHSKSGDSASEGEGTSEGSDANSQNDSQMKSGGRQDSFEDEPSQNGTSAYTSQNGGISTPATVVNQNVPIIPISAGGAPGAVPGPTTNLNIGMDYWGTPAPSNIPALGRKVPSTAVAGSRDSVQSQLWLQDEREIKRQRRKQSNRESARRSRLRKQAECDELAQRAEALKEENASLRSEVSRIRSDYEQLLSENTALKERLGELPANDQHVGNEAQQNGQTEGVQGGH

SEQ ID NO: 796 - DNA, 1254 bp, Populus balsamifera subsp. trichocarpa
  misc_feature (1)..(1254): Ceres GDNA ANNOT ID no. 1447080
atgggtagcagtgatatggataaaacaggaaaggagaaggaggccaagacaccatctgctgcttctacacaggaacagccttcaactgccggtgctgccactgtaaatccagactggtctgggtttcaggcctattctcatatacctccaccagggttcttggcatcaagtccccaagctcacccatatatgtggggggttcagcacattatgcctccctatggtaccccaccacatccatatgttgcaatgtatcctcacggtgtatatgctcatccgtccattcccccgggttcttatccttttagtccttttgcaatgccttctccaaatggtatcgctgaggtttctggaaacactcctggcagcatggaagccgaaggaagaccatctgatgccaaggaaaaattacctattaaaaggtccaaaggaagcttgggcagtttaaacatgattactgggaagaataatgagcatgggagaacaacaggagcatctgctaatggagcttattcgaaaagtgctgagagtggaagtgaaggcacaagtgaaggaagtgatgcggattctcagagtgactcacaaatgaagtcaggtggcagacaagattctctggaagaaacatctcagaatggtggttctgcacatgctgctcagaatggaggacagggtgcatctacaatcatgaatcaaacaatgggtgtcctgccaatatctgctgccagtgcccctggagttatacctggtcccacaaccaacttaaatattggaatggactattggggagcccctgttgcttctagtgttcctgcaattcgtgggaaggttccttctactccagttgctggagggattgctactgctggatcacgggatggtgttcaatcgcagcattggttacaggatgaaagagagcttaagagacagagaaggaagcagtcaaacagagaatctgctcgccggtccaggttgcgtaaacagctacgtgctcctatatcaattcattggcttgcatgcatgcttttgagtcaggctgaatgcgatgagctggcccaacgtgctgaagttttaaaagaagaaaatgccaatcttagatcagaagtaaatcggatcaagagcgagtatgagcagcttcttgcagagaacgcctctctcaaggagaggctcggggaagttcatggacaagaagattccagggctggcaggaatgaccaacatacgagcaatgatacacaacagactggacaaacatag

SEQ ID NO: 797 - protein, 412 aa, Populus balsamifera subsp. trichocarpa
  misc_feature (1)..(412): Ceres GDNA ANNOT ID no. 1447080
  misc_feature (1)..(412)
  Functional Homolog of CDNA ID no. 23522373at SEQ ID no. 785with e-value of 3.8E-116 and percent identity of 65.76
MDKTGKEKEAKTPSAASTQEQPSTAGAATVNPDWSGFQAYSHIPPPGFLASSPQAHPYMWGVQHIMPPYGTPPHPYVAMYPHGVYAHPSIPPGSYPFSPFAMPSPNGIAEVSGNTPGSMEAEGRPSDAKEKLPIKRSKGSLGSLNMITGKNNEHGRTTGASANGAYSKSAESGSEGTSEGSDADSQSDSQMKSGGRQDSLEETSQNGGSAHAAQNGGQGASTIMNQTMGVLPISAASAPGVIPGPTTNLNIGMDYWGAPVASSVPAIRGKVPSTPVAGGIATAGSRDGVQSQHWLQDERELKRQRRKQSNRESARRSRLRKQLRAPISIHWLACMLLSQAECDELAQRAEVLKEENANLRSEVNRIKSEYEQLLAENASLKERLGEVHGQEDSRAGRNDQHTSNDTQQTGQT

SEQ ID NO: 798 - DNA, 1899 bp, Arabidopsis thaliana
  misc_feature (1)..(1899): Ceres CDNA ID no. 23520231
  misc_feature (1)..(1899): Also Known As  Ceres SEEDLINE ME11541
atgacactaaaagctgaagtagtggaaaatttttcttgcccattttgcttgattccatgtggaggtcacgagggcttgcaacttcatttgaagtcatcacatgacgcctttaaatttgagttttatcgggcagagaaagatcacggaccggaagttgatgtctccgtgaaaagtgatacaataaaatttggggttctaaaggatgatgtaggaaatccccaattgagccctttgacgttttgctcgaaaaatcgtaaccaaagaagacaaagagatgatagcaataacgttaagaaacttaatgtactccttatggagttggatttagatgacttacctcgtggcacagaaaatgattctactcatgtgaatgatgataatgtctcatcgccaccaagagctcactcttccgagaagattagcgacattttaaccacgactcaactagcaatagctgaatcctctgaacctaaggtgcctcatgtgaatgatggtaatgtctcatcgccaccaagagctcactcttcggccgagaagaatgaatctactcatgtgaatgatgatgatgatgtctcatcaccacctagagctcactctttggagaagaatgaatctactcatgtgaatgaggataatatttcatcgccaccaaaagctcactcttcgaagaagaatgaatcgactcatatgaatgatgaagatgtctcatttccaccaagaactcgctcttcgaaggagacgagcgacattttaaccacaactcaaccagcaatagttgaaccttctgaacctaaggtgcgtcgtgttagtagaagaaaacagttatatgcaaagcggtacaaggctagagagactcaaccagcaatagctgagtcttctgaaccaaaggtgctgcatgtgaatgatgaaaatgtctcatcgccaccagaagctcactctttggagaaggctagcgacattttaaccacgactcaaccagcaatagctgagtcctctgaacctaaggtgcctcatgtgaatgatgaaaatgtatcatcgacaccaagagctcactcttcaaagaagaataaatctactcgtaagaatgttgataatgtcccatcgccaccaaaaactcgctcttcgaagaagactagcgacatattaactacgactcaaccaacaatagctgagtcttctgaacctaaggtgcgtcatgtgaatgatgataatgtctcatcgacaccaagagctcactcttcaaagaagaataaatctactcgtaagaatgatgataatattccatcgccaccaaaaactcgctcttcgaagaagactagcaacattttagctacgactcaaccagcaaaagctgagccttctgaacctaaggtgactcgtgttagtagaagaaaagagttacatgcagagcggtgcgaggctaaaagattggagcgtcttaagggtcgacagttctatcactcccaaacaatgcagccaattacttttgaacaagtaatgtctaacgaggatagcgagaatgagactgatgattatgctttagatattagcgaacgcctgagacttgaacgtcttgtgggtgtgagcaaagaggaaaagcgatacatgtatctttggaacatatttgtacgaaaacaaagggtgatcgcggatggacatgttccttgggcatgtgaagagtttgcaaaacttcataaggaagagatgaagaattcttcatctttcgattggtggtggagaatgtttaggattaaactgtggaacaacggtctcatctgcgccaagaccttccacaaatgcactaccatcctcctcagtaactcggatgaagcaggacaattcacctctggcagtgctgctaatgccaacaatcaacaatctatggaagttgatgaataa

SEQ ID NO: 799 - protein, 632 aa, Arabidopsis thaliana
  misc_feature (1)..(632): Ceres CDNA ID no. 23520231
  misc_feature (1)..(632): Also Known As  Ceres SEEDLINE ME11541
  misc_feature: Phenotype: Curled 3 Useful for making plants with altered leaf shape e.g., curled leaves
MTLKAEVVENFSCPFCLIPCGGHEGLQLHLKSSHDAFKFEFYRAEKDHGPEVDVSVKSDTIKFGVLKDDVGNPQLSPLTFCSKNRNQRRQRDDSNNVKKLNVLLMELDLDDLPRGTENDSTHVNDDNVSSPPRAHSSEKISDILTTTQLAIAESSEPKVPHVNDGNVSSPPRAHSSAEKNESTHVNDDDDVSSPPRAHSLEKNESTHVNEDNISSPPKAHSSKKNESTHMNDEDVSFPPRTRSSKETSDILTTTQPAIVEPSEPKVRRVSRRKQLYAKRYKARETQPAIAESSEPKVLHVNDENVSSPPEAHSLEKASDILTTTQPAIAESSEPKVPHVNDENVSSTPRAHSSKKNKSTRKNVDNVPSPPKTRSSKKTSDILTTTQPTIAESSEPKVRHVNDDNVSSTPRAHSSKKNKSTRKNDDNIPSPPKTRSSKKTSNILATTQPAKAEPSEPKVTRVSRRKELHAERCEAKRLERLKGRQFYHSQTMQPITFEQVMSNEDSENETDDYALDISERLRLERLVGVSKEEKRYMYLWNIFVRKQRVIADGHVPWACEEFAKLHKEEMKNSSSFDWWWRMFRIKLWNNGLICAKTFHKCTTILLSNSDEAGQFTSGSAANANNQQSMEVDE

SEQ ID NO: 800 - DNA, 1557 bp, Arabidopsis thaliana
  misc_feature (1)..(1557): Ceres CDNA ID no. 12672729
  misc_feature (1)..(1557): Also Known As  Ceres SEEDLINE ME11543
atggaagaagaagatcctacagcaagcaatgtgataacgaattcgaattcttcatctatgagaaacctatcgccggcgatgaatactccggtggtttcacttgagtcacgaatcaatcgattaatcaatgctaatcaatctcaatcaccatcaccatcatcactatcaaggtctatatactctgatagatttatccccagtagatccggatccaatttcgctcttttcgatctatctccttctcctagtaaagatggtaaggaagatggagctggctcttacgctactctgttgcgtgcggcgatgtttggtcctgagacgccggagaagagagatattactgggttttcttcttccaggaatatttttaggtttaagacggagactcatcggtctttgaattcgttttctccttttggtgttgatgatgattctcctggtgtttctcatagtggtcctgttaaagctcccaggaaagtgccgcgatcgccgtataagattcttgatctcgttgactttagatctttggtttcgataatgcatgaaacaatttgtgatctttgtgatgttttggtctctgagggtctagaatttgagtctgaggtattggatgcaccggccttgcaagatgatttttatctgaatcttgtggattggtctgcacaaaatgttctagcagtgggactagggaactgtgtgtatttatggaatgcttgtagcagcaaggttactaagttatgtgatctcggagctgaggatagtgtttgctcagtgggttgggcgttacgtggaactcatctggctgttggaactagtaccgggaaagttcagatatgggatgcgtcacgctgcaagagaacaagaacaatggaaggtcatcgtctaagagttggagccctggcatggggttcatcggttctgtcatctggtagcagagacaagagtattcttcagagagacataaggtgtcaagaagatcatgtcagtaaattggcaggtcataaatctgaggtatgcggactcaagtggtcttatgacaacagagagctagcatctggtggaaacgacaataggctttttgtatggaaccaacattcaacacaaccggttttgaaatatagtgaacacactgcagctgttaaagccattgcttggtctcctcatgttcatgggcttcttgcttctggtggtggtactgctgatagatgcatacgtttttggaatacaaccacgaatactcatttaagttccatagatacttgcagtcaggtatgcaatctagcttggtctaagaacgtaaacgagcttgttagcacacacggatactctcagaaccaaatcattgtctggaaatacccaaccatgtccaaaattgctactctaaccggtcacacataccgagtcttataccttgcggtttcacccgatggacagacgattgtaacaggagcaggagatgaaaccttaaggttctggaatgttttcccttccccaaaatctcagaacacggatagtgaaatcgggtcgtctttctttggtagaacaacaattcggtga

SEQ ID NO: 801 - protein, 518 aa, Arabidopsis thaliana
  misc_feature (1)..(518): Ceres CDNA ID no. 12672729
  misc_feature (1)..(518): Also Known As  Ceres SEEDLINE ME11543
  misc_feature (244)..(280): Pfam Name: WD40 Pfam Description: WD domain, G-beta repeat
  misc_feature: Phenotype: Dark Green Useful for increasing chlorophyll and photosynthetic capacity
MEEEDPTASNVITNSNSSSMRNLSPAMNTPVVSLESRINRLINANQSQSPSPSSLSRSIYSDRFIPSRSGSNFALFDLSPSPSKDGKEDGAGSYATLLRAAMFGPETPEKRDITGFSSSRNIFRFKTETHRSLNSFSPFGVDDDSPGVSHSGPVKAPRKVPRSPYKILDLVDFRSLVSIMHETICDLCDVLVSEGLEFESEVLDAPALQDDFYLNLVDWSAQNVLAVGLGNCVYLWNACSSKVTKLCDLGAEDSVCSVGWALRGTHLAVGTSTGKVQIWDASRCKRTRTMEGHRLRVGALAWGSSVLSSGSRDKSILQRDIRCQEDHVSKLAGHKSEVCGLKWSYDNRELASGGNDNRLFVWNQHSTQPVLKYSEHTAAVKAIAWSPHVHGLLASGGGTADRCIRFWNTTTNTHLSSIDTCSQVCNLAWSKNVNELVSTHGYSQNQIIVWKYPTMSKIATLTGHTYRVLYLAVSPDGQTIVTGAGDETLRFWNVFPSPKSQNTDSEIGSSFFGRTTIR

SEQ ID NO: 802 - protein, 453 aa, Arabidopsis thaliana
  misc_feature (1)..(453): Ceres CLONE ID no. 1343575
  misc_feature (1)..(453)
  Functional Homolog of CDNA ID no. 12672729at SEQ ID no. 801with e-value of 0 and percent identity of 82.20
MNRPTVSLESRINRLIDSNHYHSPSKPIYSDRFIPSRSGSNFALFDLASSSPNKKDGKEDGAGSYASLLKTALFGPVTPEKSDVVNGFSPSGNIFRFKTETQRSLNLYPPFDSDVVSGVSPSPVKSPRKILRSPYKVLDAPALQDDFYLNLVDWSAQNVLAVGLGNCVYLWNACSSKVTKLCDLGVDETVCSVGWALRGTHLAIGTSSGTVQIWDVLRCKNIRTMEGHRLRVGALAWSSSVLSSGSRDKSILQRDIRTQEDHVSKLKGHKSEICGLKWSSDNRELASGGNDNKLFVWNQHSTQPVLRFCEHAAAVKAIAWSPHHFGLLASGGGTADRCIRFWNTTTNTHLNCVDTNSQVCNLVWSKNVNELVSTHGYSQNQIIVWKYPTMSKLATLTGHSYRVLYLAVSPDGQTIVTGAGDETLRFWNVFPSPKSQSRESEIGALSFGRTTIR

SEQ ID NO: 803 - protein, 475 aa, Arabidopsis thaliana
  misc_feature (1)..(475): Public GI no. 20259635
  misc_feature (1)..(475)
  Functional Homolog of CDNA ID no. 12672729at SEQ ID no. 801with e-value of 0 and percent identity of 82.20
MEEDESTTPKKKSDSQLNLPPSMNRPTVSLESRINRLIDSNHYHSPSKPIYSDRFIPSRSGSNFALFDLASSSPNKKDGKEDGAGSYASLLKTALFGPVTPEKSDVVNGFSPSGNIFRFKTETQRSLNLYPPFDSDVVSGVSPSPVKSPRKILRSPYKVLDAPALQDDFYLNLVDWSAQNVLAVGLGNCVYLWNACSSKVTKLCDLGVDETVCSVGWALRGTHLAIGTSSGTVQIWDVLRCKNIRTMEGHRLRVGALAWSSSVLSSGSRDKSILQRDIRTQEDHVSKLKGHKSEICGLKWSSDNRELASGGNDNKLFVWNQHSTQPVLRFCEHAAAVKAIAWSPHHFGLLASGGGTADRCIRFWNTTTNTHLNCVDTNSQVCNLVWSKNVNELVSTHGYSQNQIIVWKYPTMSKLATLTGHSYRVLYLAVSPDGQTIVTGAGDETLRFWNVFPSPKSQSRESEIGALSFGRTTIR

SEQ ID NO: 804 - protein, 487 aa, Lotus japonicus
  misc_feature (1)..(487): Public GI no. 66932877
  misc_feature (1)..(487)
  Functional Homolog of CDNA ID no. 12672729at SEQ ID no. 801with e-value of 1.5E-185 and percent identity of 81.94
MDDSSGHRNPPPPPSSSADTPPPPPSSSSSTSSSAESLRHVERMINSNHYASPSRTIYSDRFIPSRSASKFALFDISTPPEGRDDTSSAYTTLLRTALFGPDAAGVAPPVTPDKRSSPSMSLPSRNIFRYKMETRQSMHSLSPFMSDDAVPGVNPSPVKTPRKVPRSPYKVLDAPALQDDFYLNLVDWSSHNVLAVGLGNCVYLWNACSSKVTKLCDLGIDDCVCSVGWAQRGTHLAVGTSNGKVQIWDASRCKKIRSMEGHRLRVGALAWSSSLLSSGGRDKNIYQRDIRAQEDYVSKLSGHKSEVCGLKWSYDNRELASGGNDNRLFVWNQHSTQPVLKYCEHTAAVKAIAWSPHLHGLLASGGGTADRCIRFWNTTTNSHLSCMDTGSQVCNLVWSKNVNELVSTHGYSQNQIIVWRYPTMSKLATLTGHTYRVLYLAISPDGQTIVTGAGDETLRFWNVFPFPKSQNTDSEIGASSLGRTIIR

SEQ ID NO: 805 - protein, 475 aa, Medicago sativa subsp. x varia
  misc_feature (1)..(475): Public GI no. 4558462
  misc_feature (1)..(475)
  Functional Homolog of CDNA ID no. 12672729at SEQ ID no. 801with e-value of 0 and percent identity of 78.04
MDGTGNRNPPPTSTVRDNSPPPEPSPESLRHVSRMINSNHYTSPSRTIYSDRFIPSRSASKFALFDINTPTEGRDDSSSAYTTLLRTALFGPDVAGPVTPEKTDSPSMTLPNRNIFRYKTETRQSMHSLSPFMDDDFVPGVNHSPVKAPRKVPRSPYKVLDAPALQDDFYLNLVDWSSHNVLAVGLGNCVYLWNACSSKVTKLCDLGVDDCVCSVGWAQRGTHLAVGTNNGKVQIWDAARCKKIRSMEGHRLRVGALAWSSSLLSSGGRDKNIYQRDIRTQEDFVSKLSGHKSEVCGLKWSYDNRELASGGNDNKLFVWNQHSTQPVLKYCEHTAAVKAIAWSPHLHGLLASGGGTADRCIRFWNTTTNSHLSCMDTGSQVCNLVWSKNVNELVSTHGYSQNQIIVWRYPTMSKLATLTGHTYRVLYLAISPDGQTIVTGAGDETLRFWNVFPSPKSQNTESEIGALSLGRTTIR

SEQ ID NO: 806 - protein, 475 aa, Medicago truncatula
  misc_feature (1)..(475): Public GI no. 7158292
  misc_feature (1)..(475)
  Functional Homolog of CDNA ID no. 12672729at SEQ ID no. 801with e-value of 0 and percent identity of 77.61
MDGTGNRNPPPTSTVGDNSPPPEPSPESLRHVSRMINSNHYTSPSRTIYSDRFIPSRSASKFALFDINTPTEGRDDSSSAYTTLLRTALFGPDVAGPVTPEKTDSPSMTLPNRNIFRYKTETRQSMHSLSPFMDDDFVPGINHSPVKAPRKVPRSPYKVLDAPALQDDFYLNLVDWSSHNVLAVGLGNCVYLWNACSSKVTKLCDLGVDDCVCSVGWAQRGTHLAVGTNNGKVQIWDAARCKKIRSMEGHRLRVGALAWSSSLLSSGGRDKNIYQRDIRTQEDFVSKLSGHKSEVCGLKWSYDNRELASGGNDNKLFVWNQHSTQPVLKYCEHTAAVKAIAWSPHLHGLLASGGGTADRCIRFWNTTTNSHLSCMDTGSQVCNLVWSKNVNELVSTHGYSQNQIIVWRYPTMSKLATLTGHTYRVLYLAISPDGQTIVTGAGDETLRFWNVFPSPKSQNTESEIGALSLGRTTIR

SEQ ID NO: 807 - protein, 475 aa, Pisum sativum
  misc_feature (1)..(475): Public GI no. 66932879
  misc_feature (1)..(475)
  Functional Homolog of CDNA ID no. 12672729at SEQ ID no. 801with e-value of 2.2E-184 and percent identity of 78.43
MDGTGNRRNTPPSATSPPPSPSPENLRHVERMINSNHYTSPSRTIYSDRFIPSRSASKFALFDINTTTEGRDDSSSAYTSLLRTALFGPDAAGVAGPITPEKRDSPSMTLPSRNIFRYKTETRQSMHSLSPFMSDDVVPGVNQIPVKAPRKVPRSPYKVLDAPALQDDFYLNLVDWSSHNVLAVGLGNCVYLWNACSSKVTKLCDLGVDDCVCSVGWAQRGTHLAVGTNNGKVQIWDAARCKKIRSMEGHRLRVGALAWSSSLLSSGGRDKNIYQRDIRTQEDFVSKLSGHKSEVCGLKWSYDNRELASGGNDNKLFVWNQHSTQPVLKYCEHTAAVKAIAWSPHLHGLLASGGGTADRCIRFWNTTTNSHLSCMDTGSQVCNLVWSKNVNELVSTHGYSQNQIIVWRYPTMSKLATLKGHTYRVLYLAISPDGQTIVTGAGDETLRFWNVFPSPKSQNTESEIGALSLGRTTIR

SEQ ID NO: 808 - DNA, 1479 bp, Populus balsamifera subsp. trichocarpa
  misc_feature (1)..(1479): Ceres GDNA ANNOT ID no. 1500350
atggccgatcccacgatgtcaccgccaaaccaatcgcagctcaacgttgcagcttccacgacgcaacgtcgtcaacatcatttaaatcttgaaagcctagctccatcaccgtcatcatcggaacatgtcaaccgtctgattaattctaatcattatatttccccctcgagacctatttactccgataggtttattccctgtagatccagctcgaatttcgctcttttcaacatctctttgccctcgccttctgcaaccgcgggtagttcgccgggggacggagggaaggaggacaatcccaatgcgtatgcggcgttactcaggaatgcactttttggtcctcagactccggataagaaagactgggggacaggggcggctggacggaatattttccggtacaagacggagactaggcagtcaatgcactcgctttcgcctttcgggtttgatggtttaagtggtcctggtgttagtaatgttgctattaaggctcctaggaaggtttctagatcaccttataaggtattggatgcccctgcattgcatgatgatttttatttgaatttggtggattggtcgtcgcataatgtgttggcagtggggttagggacttgtgtgtatttatggaatgcttgtagtagcaaggtgaccaaattgtgtgatttggggaatgatgatggtgtatgttcagtaggatgggctcatcgtggtacacatcttgctgttggaaccagcaatgggaaagttcagatttgggatgcttcacgctgtaaaaggattagaatcatggagggtcatcgattgcgagttggggccttggcctggagttcatcaatgctgtcttctggtagccgggataagagcattcttcaacgagatatacgagcacaagaagactttgttagtaaactctctggacacaagtcagaggtttgtggactgaagtggtcttatgataaccgtgagttagcatcaggcggaaatgataatcgactttttgtttggaatcaacattcaacccaacctgtgctaaaatactgtgagcatacagcggctgtaaaagcaattgcttggtcaccccatcttcatggacttcttgcatccgggggtgggactgctgaccggtgtatacgattctggaatacaaccaccaactcacatctcagctgcatggacaccggcagtcaggtgtgcaatcttgtgtggtctaagaatgtcaatgaactagtcagcacacatggatactcccaaaaccaaataatagtatggagataccccaccatgtcaaagttggcaactctgacaggccatacatacagagttctttatcttgccatctcaccagacggacagacaattgtcactggagctggagatgaaactctgcggttttggaatgtgttcccttcccctaaatctcagaacacagagagtgaaattggagcatcatctctgggtagaactacaatccggtga

SEQ ID NO: 809 - protein, 492 aa, Populus balsamifera subsp. trichocarpa
  misc_feature (1)..(492): Ceres GDNA ANNOT ID no. 1500350
  misc_feature (1)..(492)
  Functional Homolog of CDNA ID no. 12672729at SEQ ID no. 801with e-value of 1.3E-188 and percent identity of 78.24
MADPTMSPPNQSQLNVAASTTQRRQHHLNLESLAPSPSSSEHVNRLINSNHYISPSRPIYSDRFIPCRSSSNFALFNISLPSPSATAGSSPGDGGKEDNPNAYAALLRNALFGPQTPDKKDWGTGAAGRNIFRYKTETRQSMHSLSPFGFDGLSGPGVSNVAIKAPRKVSRSPYKVLDAPALHDDFYLNLVDWSSHNVLAVGLGTCVYLWNACSSKVTKLCDLGNDDGVCSVGWAHRGTHLAVGTSNGKVQIWDASRCKRIRIMEGHRLRVGALAWSSSMLSSGSRDKSILQRDIRAQEDFVSKLSGHKSEVCGLKWSYDNRELASGGNDNRLFVWNQHSTQPVLKYCEHTAAVKAIAWSPHLHGLLASGGGTADRCIRFWNTTTNSHLSCMDTGSQVCNLVWSKNVNELVSTHGYSQNQIIVWRYPTMSKLATLTGHTYRVLYLAISPDGQTIVTGAGDETLRFWNVFPSPKSQNTESEIGASSLGRTTIR

SEQ ID NO: 810 - DNA, 696 bp, Arabidopsis thaliana
  misc_feature (1)..(696): Ceres CDNA ID no. 4984839
  misc_feature (1)..(696): Also Known As  Ceres SEEDLINE ME11647
atgggaagaagaaaagtagagatcaaacgaattgagaacaaaagctctcgacaagttactttctgtaaacgacgaaatggtctcatggagaaagctcgtcaactctcaattctttgtgaatcctccgtcgctcttatcatcatctctgccaccggaagactctacagcttctcctcaggtgatagcatggccaagatcctcagtcgttatgaattagaacaggctgatgatcttaaaaccttgtgccttaacattgtggagagagaccagcatagaatcactctgttctttacagttggtattgcactagaaagtccacgacgtggttctaaacttgatctagaagaaaaaactcttaattatctttcgcacaaggagttgctagaaacaatccaatgcaagattgaagaagcgaaaagcgataatgtaagtatagattgtctaaagtccctggaagagcagctcaagactgctctgtctgtaactagagctaggaagacagaactaatgatggagcttgtgaagacccatcaagagaaggagaagctgctgagagaggagaaccagagtttgactaaccagcttataaagatggggaagatgaagaagtctgtggaagcagaggatgcaagagcaatgtcaccggaaagtagctctgacaacaagccaccggagactctcctgcttctcaagtaa

SEQ ID NO: 811 - protein, 231 aa, Arabidopsis thaliana
  misc_feature (1)..(231): Ceres CDNA ID no. 4984839
  misc_feature (1)..(231): Also Known As  Ceres SEEDLINE ME11647
  misc_feature (100)..(197): Pfam Name: K-box Pfam Description: K-box region
  misc_feature (9)..(59): Pfam Name: SRF-TF Pfam Description: SRF-type transcription factor (DNA-binding and dimerisation domain)
  misc_feature: Phenotype: Late Flowering Useful for delaying flowering time
  misc_feature: Phenotype: Dark Green Useful for increasing chlorophyll and photosynthetic capacity
MGRRKVEIKRIENKSSRQVTFCKRRNGLMEKARQLSILCESSVALIIISATGRLYSFSSGDSMAKILSRYELEQADDLKTLCLNIVERDQHRITLFFTVGIALESPRRGSKLDLEEKTLNYLSHKELLETIQCKIEEAKSDNVSIDCLKSLEEQLKTALSVTRARKTELMMELVKTHQEKEKLLREENQSLTNQLIKMGKMKKSVEAEDARAMSPESSSDNKPPETLLLLK

SEQ ID NO: 812 - protein, 222 aa, Brassica rapa subsp. pekinensis
  misc_feature (1)..(222): Public GI no. 71834749
  misc_feature (1)..(222)
  Functional Homolog of CDNA ID no. 4984839at SEQ ID no. 811with e-value of 1E-60 and percent identity of 74.19
MGRRKVEIKRIENKSSRQVTFCKRRNGLMKKARQLSILCESSVALLIVSSTGKLYSSSSGDSMAKILTRYKTQHADELKTVTSFFSVDIAVKSLPQGFQFVVYQTLFSRDLAEKTRNYLSHEELLEIVQCKLEEAKNDNMSIESLISLEEQFKSALSLTRARKAELMMEFLKTLQEKEKLLREENKVLASQLTKVIIFSISRKRSVSEFLTDEEEQVSGSRR

SEQ ID NO: 813 - protein, 199 aa, Brassica rapa subsp. pekinensis
  misc_feature (1)..(199): Public GI no. 71834747
  misc_feature (1)..(199)
  Functional Homolog of CDNA ID no. 4984839at SEQ ID no. 811with e-value of 2.2E-58 and percent identity of 69.35
MGRRKVEIKRIESKSSRQVTFCKRRNGLIEKARQLSVLCESSVAILMVSSTGKLYTSSYGDSMEKIIKRYEIQHADELKNLDLEEKFRKYLSYKELVDIVQCKCEEAKVDDASVESLNSLEEQFKAALSVTRARKTQLMMEFLKNLEEKEKLLREENQILASQLTKMEKKRLPETEGEGAMSSENSSRNSPPETLPLLK

SEQ ID NO: 814 - protein, 196 aa, Brassica napus
  misc_feature (1)..(196): Public GI no. 31580813
  misc_feature (1)..(196)
  Functional Homolog of CDNA ID no. 4984839at SEQ ID no. 811with e-value of 1E-46 and percent identity of 60.71
MGRKKLEIKRIENKSSRQVTFSKRRNGLIEKARQLSVLCDASVALLVVSASGKLYNFSAGDNLVKILDRYGKQHADDLKALDLQSKAPKYGSHHELLELVESKLVESNSDVSVDSLVQLEDHLETALSVTRARKTELMLKLVDSLKEKEKLLKEENQGLASQMEKNNLAGAEADKMEMSPGQISDINRPVTLRLLY

SEQ ID NO: 815 - protein, 206 aa, Cryptomeria japonica
  misc_feature (1)..(206): Public GI no. 15667638
  misc_feature (1)..(206)
  Functional Homolog of CDNA ID no. 4984839at SEQ ID no. 811with e-value of 1.5E-21 and percent identity of 32.18
MGRGKIEIKRIESTTNRQVTFSKRRSGLFKKAKEISILCASDVAVIVFNSTGRLFDFASSSMKRILERYRNASGRGVWNNEYEQMLSQFRNLKKENEELQKELSCVTGENVETLAPKQLDYLEENLVLAAKKVRERKTEVLKYERRKTESKVIGLQQKQSILMELLAHAENHEEYGFTVSNSEGQTTPPPAFRVQPSQPNLQGSGH

SEQ ID NO: 816 - protein, 196 aa, Brassica napus
  misc_feature (1)..(196): Public GI no. 17933458
  misc_feature (1)..(196)
  Functional Homolog of CDNA ID no. 4984839at SEQ ID no. 811with e-value of 4E-45 and percent identity of 60.20
MGRKKLEIKRIEKNSSRQVTFCKRRNGLIEKARQLSVLCEASVGLLVVSASDKLYSFSSGDRLEKILDRYGKKHADDLNALDLQSKSLNYSSHHELLELVESKLVESIDDVSVDSLVELEDHLETALSVTRARKAELMLKLVESLKEKENLLKEENQVLASQIEKKNLEGAEADNIEMSSGQISDINLPVTLPLLN

SEQ ID NO: 817 - protein, 196 aa, Arabidopsis arenosa
  misc_feature (1)..(196): Public GI no. 73915377
  misc_feature (1)..(196)
  Functional Homolog of CDNA ID no. 4984839at SEQ ID no. 811with e-value of 2.3E-45 and percent identity of 60.00
MGSKKLEIKRIENKSSRQVTFSKRRNGLIEKARQLSVLCDASVALLVVSASGKLYSFSSGDNLVKILDRYGKQHADDLKALDIQSKALNYGSHHELLELVESKLVGSNVKNVSVDTLVQLEEHLGTALSVTRAKKTELMLKLVENLKEKEKLLKAENQVLASQMKKNHHVGAEAEMEISPAGQISDNLPVTLPLLN

SEQ ID NO: 818 - protein, 197 aa, Brassica napus
  misc_feature (1)..(197): Public GI no. 17933450
  misc_feature (1)..(197)
  Functional Homolog of CDNA ID no. 4984839at SEQ ID no. 811with e-value of 1.5E-45 and percent identity of 59.39
MGRKKLEIKRIENKSSRQVTFSKRRNGLIEKARQLSVLCDASVALLVVSASGKLYSFSSGDNLVKILDRYGKQHDDDLKALDRQSKALDCGSHHELLELVESKLEESNVDNVSVGSLVQLEEHLENALSVTRARKTELMLKLVENLKEKEKLLEEENHVLASQMEKSNLVRAEADNMDVSPGQISDINLPVTLPLLN

SEQ ID NO: 819 - protein, 197 aa, Brassica napus; identical to SEQ ID NO: 818
  misc_feature (1)..(197): Ceres CLONE ID no. 1065387
  misc_feature (1)..(197)
  Functional Homolog of CDNA ID no. 4984839at SEQ ID no. 811with e-value of 1.2E-45 and percent identity of 59.39

SEQ ID NO: 820 - DNA, 2439 bp, Arabidopsis thaliana
  misc_feature (1)..(2439): Ceres CDNA ID no. 36817505
  misc_feature (1)..(2439): Also Known As  Ceres SEEDLINE ME11651
atgtccggcagtctaggtttaacgccggcatccttaaaggcatctggccggagctccgagaatgtcagtcttcttacccttcaaggtaaaatcaaacgtgacccagaaggttacgaaacagagctccaattgatttacaaacagttcaaaacctccgtcgatctcttccatgaactagcagctctcagtttctcctccactggtggcattggctctgacccttctgtttcgaaagacctcggcgaccgtgccatgtttctagctcacgttactcccttttacccgaagcaactcgcggcgtttccagctcaattaactggtttactccgtacttcgtgcttagctatgccctcggggcttcgaaaccatattgcacaagctctgatccttctaatgaatcgaaagagtcttgtcatcgaggatttgctggctttgtttctggatattcagactcttggtgacaaaaacctgcgaaatcttgcttttggtcacattgttcaaaccattcgtaagatgagtatcaccgatcccaagcacaaatcacttcagaagattgtaatctctatgttggagcaagaagatgaagcaaaggctaagagagcacttgctactctctgtgcgctacacaagaaaaagatctggcttggtgataaaaatgaaagagttgcaattgcgatttgtgaagcctgctttcattcttcacctaggattatgatttccgctcttcggtttcttcttgattatgagaacatagacgatgatgacgatagtgatgctgaaagcgatgatgacgaggagtcaaagaaaatagatcaggttgtgattaatcgacaggctgtttacaaggcaaacaacaaaggtacatcctctagcaagaagaaaaagcaagcaaaacttcagcgtgcagtgaaaagtattaaaagaaagcagcgttcgtcgtctgagaacaccacttcaacattttcacctcttaatcatttaaatgatgcgcagaaattcgcagagaaattgttttcccgtcttcagaccatcaagggcagtggtgaacgtgttgagactaggttgatgatgattaaagttattgctcgcacaattggtcttcacaagttgcatttactaagtttctatccttttcttcaaaactatgctctgccgcatgtaaaggacattacacaaatacttgcagcagcagttcaatcttgccacgatggggttccttctgatgttgtggagccactgttcaagcaaattgtgaatcagtttgtacacgacaagtcacgtcctgaggctattgctgtcggactcaatgtggtgcgagaaatgtgcctgagggttcacgacttgatgacagaagagttactgcaagatcttgctctgtataaaaagtcccatgaaaaagccatctcagcagcagcacgttccctcatagcattgttcagagaggtagccgaagcatttgatttgttgatcaacccttcgcttctggttaaaaaagatcgtggccgtcctggagctaccgtcttcatacctaaacattatggagagtctaatgtcttcagcaatgttcctaatgttgaattattgcaagaaagtgataatgagagtggctctgatggtgatcaagacgatgatggcgtggagttgcctatcggcgatgatgttgagcaggagctgatacctggtgattgtggaagcgaggacaaagctgaagaagattccaatgatggtgatgatatgaataacactgaagacgatagtgatatagatacttcaataggtggtgatgaagatgaagaggtgaatgacagtgatgaagctgatacagattcggaaaatgaggaaatcgaaagcgaagaagaggatggagaagcttctgattcttctgtagaggatagtggaaacaaagagaaagctaagggcaagaagaggaagattgtagattttgatgcgaatcttctctctgctgatacaagcctccgagcactcaagagattcgcagaagcaaagaacgaaaagccttcttttgatgaaggtgatggcatactttcgaatgaggacttccgaaaaatcaaaacacttcaggcaaagaaggaagcaaaaattgcattggctcgaaaaggattcaaggttccgaattctgatcagctaagcaagaagcgggtcgatccagccaaacttgaagctcacataaggcataaactaacaaaggaacaaagactggaattagttaaagcgggtagggaggacagagggaaatacaaatccaaggctgccgtcaaacagaagaagactggaggatcaagcaataaacagaaggagcacaggaagaatatgcctcttgctgcaataagatcaaaggctggtaaatcaaaacgaattaagaagatgaagaatagcatcagcggaagccagtttagaggaaggaaagcttggaagtga

SEQ ID NO: 821 - protein, 812 aa, Arabidopsis thaliana
  misc_feature (1)..(812): Ceres CDNA ID no. 36817505
  misc_feature (1)..(812): Also Known As  Ceres SEEDLINE ME11651
  misc_feature (449)..(811): Pfam Name: SDA1 Pfam Description: SDA1
  misc_feature (86)..(138): Pfam Name: NUC130_3NT Pfam Description: NUC130/3NT domain
  misc_feature: Phenotype: Late Flowering Useful for delaying flowering time
  misc_feature: Phenotype: Dark Green Useful for increasing chlorophyll and photosynthetic capacity
  misc_feature: Phenotype: Oval Shaped Useful for making plants with increased biomass and foliage
MSGSLGLTPASLKASGRSSENVSLLTLQGKIKRDPEGYETELQLIYKQFKTSVDLFHELAALSFSSTGGIGSDPSVSKDLGDRAMFLAHVTPFYPKQLAAFPAQLTGLLRTSCLAMPSGLRNHIAQALILLMNRKSLVIEDLLALFLDIQTLGDKNLRNLAFGHIVQTIRKMSITDPKHKSLQKIVISMLEQEDEAKAKRALATLCALHKKKIWLGDKNERVAIAICEACFHSSPRIMISALRFLLDYENIDDDDDSDAESDDDEESKKIDQVVINRQAVYKANNKGTSSSKKKKQAKLQRAVKSIKRKQRSSSENTTSTFSPLNHLNDAQKFAEKLFSRLQTIKGSGERVETRLMMIKVIARTIGLHKLHLLSFYPFLQNYALPHVKDITQILAAAVQSCHDGVPSDVVEPLFKQIVNQFVHDKSRPEAIAVGLNVVREMCLRVHDLMTEELLQDLALYKKSHEKAISAAARSLIALFREVAEAFDLLINPSLLVKKDRGRPGATVFIPKHYGESNVFSNVPNVELLQESDNESGSDGDQDDDGVELPIGDDVEQELIPGDCGSEDKAEEDSNDGDDMNNTEDDSDIDTSIGGDEDEEVNDSDEADTDSENEEIESEEEDGEASDSSVEDSGNKEKAKGKKRKIVDFDANLLSADTSLRALKRFAEAKNEKPSFDEGDGILSNEDFRKIKTLQAKKEAKIALARKGFKVPNSDQLSKKRVDPAKLEAHIRHKLTKEQRLELVKAGREDRGKYKSKAAVKQKKTGGSSNKQKEHRKNMPLAAIRSKAGKSKRIKKMKNSISGSQFRGRKAWK

SEQ ID NO: 822 - DNA, 2406 bp, Populus balsamifera subsp. trichocarpa
  misc_feature (1)..(2406): Ceres GDNA ANNOT ID no. 1459700
atggcggattccttgtcggcgtcggggcggagctcggagaagctgagccttcaatctctccaatccaaaatgaaaattgacccagaaggttacgaaacggagctcggcttggtttacaaccaatttaagtcggctttggatctttttcaacagcaagcagctctcagtttcgcctcctcctccggtgtctgcgctgaccccactatttacaaggacctcagtgaccgcgccacttttttgtctcatgttacacctttttacccgaagcagcttgctgagttcccagctcaactcgctgagtttctcaaatcgtctgctcggactctgccttcgggacttcggtgtcatgttactcaagcgcttattctactgattaatcgagatatggttgatattagtgaaactctagcattgttcatggagcttcaaacactgggagataggacattgaggaatttggcttttactcatgttgttcatagcattaggaggatgaataagaagcataaaaatgaggctaagaatcgggcccttcaaaatatcctcttttccttgctacagcaagatgatgaagcacgagcgaagagagcactcatcacactatgtgagcttcatcgaaggaaggtgtggttcgatgatagaactgcaaattcaatttgtatggcatgttttcattcatcatcaagaatcatgattgctgctctgtcttttctcctcgattatgagaagattgaagataatgacaatgatgatagcgatgcttcaagtggcgaagacgatccaaatcctcgaacagctcaagttgtcattagtaaagagtctatttataagtattttgttcctgttttgtcaaaaccccaggcacacaataaaggtactgtagctagcaagaagaaaaagaaagcaaaactgcagcgggccatacgtagcatgaaaaggcagcaaagattgtcatcagaaaacaacaattcaaattattattcaccattcaaccatcttaaagacgcacaggggtttgctgagaggctattttctcgccttcagacttgcaatgaacgttttgaggtcaagatgatgatgttgaaagtaattgctcgaactgtggggctccaccgcttgattttattaaacttttatccttttcttcagaaatatgttcagccacatcagcgtgacatcacaaatttacttgcagcagctgtccaggcctgtcatgatctggtgcctcctgatgcagttgagccattattcaaacaaatagtaaatcaatttgtacatgatcactcgcgtcctgaggccattgctgttggactgaatgtgatcagggaaatctgcttgcgtatacctttgttgatgaatgaagatttactgcaagaccttgtattatacaagaaatctcatgagaaggcagtttcaatagctgctcgttcactcattactttattcagagaggtttgtccttctctgctgattaagaaagatcgaggtcgtcccattgacccaaaagctaggccgaaggcctatggagaagtcaatattgtcagcagtgttcctggtgttgagttgttagaagaacttaatgatgatgatgatgaagacaaggaggacagcgatgatgttgatgatttggcatcccgtggctctgatgatgattctgaaaatgaggagatggtttctgccagtgatgaaggagatcagatttacagtgatgacgctgaaagtgaggatggtgacgtgcaagatggctcagttgatgaagatggtgatgatgctgtagacaatgacagtggtggtggtgaggggggggacgaggatgaggatcaggaggagaatgatgaagacagttatgcgagggctatcataaataaagttaacaaatctactgctagaaagaggaagttctctgattttgatgggcaacttctagcagctgatacaagtttgcgggctttaaagaaaatgacagaagagaagttgaagaaaccaccatcagactctacagatggtattctttctaatgaagacttccaaagaatcaaggaacttacggccaagaaggatgccaggattgctttaaatcggcaaggatttaaggttccaagttctgatgatctgagtgctaagcgggtggatcctgctacgcttgaagttcatgtacgggcgaggctaaacaaggaagaaagattagcgctggtgagagcagggagagaggatagagagagctacaaatctagaatcgccgtaaaacagaaaaagactggcgggcagagcaacaggcagaaagaacacaaaaagcagatgcctcttgctgcaaaaagggccaaggtagcaagatctcgacaagagaaaaagaaaaagcaaagcctttctggcaagcagttccgggggaagaaagcatggaaatga

SEQ ID NO: 823 - protein, 778 aa, Populus balsamifera subsp. trichocarpa
  misc_feature (1)..(778): Ceres GDNA ANNOT ID no. 1459700
  misc_feature (1)..(778)
  Functional Homolog of CDNA ID no. 36817505at SEQ ID no. 821with e-value of 2.6E-229 and percent identity of 61.87
MKIDPEGYETELGLVYNQFKSALDLFQQQAALSFASSSGVCADPTIYKDLSDRATFLSHVTPFYPKQLAEFPAQLAEFLKSSARTLPSGLRCHVTQALILLINRDMVDISETLALFMELQTLGDRTLRNLAFTHVVHSIRRMNKKHKNEAKNRALQNILFSLLQQDDEARAKRALITLCELHRRKVWFDDRTANSICMACFHSSSRIMIAALSFLLDYEKIEDNDNDDSDASSGEDDPNPRTAQVVISKESIYKYFVPVLSKPQAHNKGTVASKKKKKAKLQRAIRSMKRQQRLSSENNNSNYYSPFNHLKDAQGFAERLFSRLQTCNERFEVKMMMLKVIARTVGLHRLILLNFYPFLQKYVQPHQRDITNLLAAAVQACHDLVPPDAVEPLFKQIVNQFVHDHSRPEAIAVGLNVIREICLRIPLLMNEDLLQDLVLYKKSHEKAVSIAARSLITLFREVCPSLLIKKDRGRPIDPKARPKAYGEVNIVSSVPGVELLEELNDDDDEDKEDSDDVDDLASRGSDDDSENEEMVSASDEGDQIYSDDAESEDGDVQDGSVDEDGDDAVDNDSGGGEGGDEDEDQEENDEDSYARAIINKVNKSTARKRKFSDFDGQLLAADTSLRALKKMTEEKLKKPPSDSTDGILSNEDFQRIKELTAKKDARIALNRQGFKVPSSDDLSAKRVDPATLEVHVRARLNKEERLALVRAGREDRESYKSRIAVKQKKTGGQSNRQKEHKKQMPLAAKRAKVARSRQEKKKKQSLSGKQFRGKKAWK

SEQ ID NO: 824 - DNA, 2322 bp, Populus balsamifera subsp. trichocarpa
  misc_feature (1)..(2322): Ceres GDNA ANNOT ID no. 1512967
atggcggattccttgtcggcgtcggggcggagctcggagaagctgagccttcaatctctccaatccaaaatgaaaattgacccagaaggttacgaaacggagctcggcttggtttacaaccaatttaagtcggctttggatctttttcaacagcaagcagctctcagtttcgcctcctcctccggtgtctgcgctgaccccactatttacaaggacctcagtgaccgcgccacttttttgtctcatgttacacctttttacccgaagcagcttgctgagttcccagctcaactcgctgagtttctcaaatcgtctgctcggactctgccttcgggacttcggtgtcatgttactcaagcgcttattctactgattaatcgagatatggttgatattagtgaaactctagcattgttcatggagcttcaaacactgggagataggacattgaggaatttggcttttactcatgttgttcatagcattaggaggatgaataagaagcataaaaatgaggctaagaatcgggcccttcaaaatatcctcttttccttgctacagcaagatgatgaagcacgagcgaagagagcactcatcacactatgtgagcttcatcgaaggaaggtgtggttcgatgatagaactgcaaattcaatttgtatggcatgttttcattcatcatcaagaatcatgattgctgctctgtcttttctcctcgattatgagaagattgaagataatgacaatgatgatagcgatgcttcaagtggcgaagacgatccaaatcctcgaacagctcaagttgtcattagtaaagagtctatttataaggcacacaataaaggtactgtagctagcaagaagaaaaagaaagcaaaactgcagcgggccatacgtagcatgaaaaggcagcaaagattgtcatcagaaaacaacaattcaaattattattcaccattcaaccatcttaaagacgcacaggtcaagatgatgatgttgaaagtaattgctcgaactgtggggctccaccgcttgattttattaaacttttatccttttcttcagaaatatgttcagccacatcagcgtgacatcacaaatttacttgcagcagctgtccaggcctgtcatgatctggtgcctcctgatgcagttgagccattattcaaacaaatagtaaatcaatttgtacatgatcactcgcgtcctgaggccattgctgttggactgaatgtgatcagggaaatctgcttgcgtatacctttgttgatgaatgaagatttactgcaagaccttgtattatacaagaaatctcatgagaaggcagtttcaatagctgctcgttcactcattactttattcagagaggtttgtccttctctgctgattaagaaagatcgaggtcgtcccattgacccaaaagctaggccgaaggcctatggagaagtcaatattgtcagcagtgttcctggtgttgagttgttagaagaacttaatgatgatgatgatgaagacaaggaggacagcgatgatgttgatgatttggcatcccgtggctctgatgatgattctgaaaatgaggagatggtttctgccagtgatgaaggagatcagatttacagtgatgacgctgaaagtgaggatggtgacgtgcaagatggctcagttgatgaagatggtgatgatgctgtagacaatgacagtggtggtggtgaggggggggacgaggatgaggatcaggaggagaatgatgaagacagttatgcgagggctatcataaataaagttaacaaatctactgctagaaagaggaagttctctgattttgatgggcaacttctagcagctgatacaagtttgcgggctttaaagaaaatgacagaagagaagttgaagaaaccaccatcagactctacagatggtattctttctaatgaagacttccaaagaatcaaggaacttacggccaagaaggatgccaggattgctttaaatcggcaaggatttaaggttccaagttctgatgatctgagtgctaagcgggtggatcctgctacgcttgaagttcatgtacgggcgaggctaaacaaggaagaaagattagcgctggtgagagcagggagagaggatagagagagctacaaatctagaatcgccgtaaaacagaaaaagactggcgggcagagcaacaggcagaaagaacacaaaaagcagatgcctcttgctgcaaaaagggccaaggtagcaagatctcgacaagagaaaaagaaaaagcaaagcctttctggcaagcagttccgggggaagaaagcatggaaatga

SEQ ID NO: 825 - protein, 750 aa, Populus balsamifera subsp. trichocarpa
  misc_feature (1)..(750): Ceres GDNA ANNOT ID no. 1512967
  misc_feature (1)..(750)
  Functional Homolog of CDNA ID no. 36817505at SEQ ID no. 821with e-value of 6.7E-222 and percent identity of 61.62
MKIDPEGYETELGLVYNQFKSALDLFQQQAALSFASSSGVCADPTIYKDLSDRATFLSHVTPFYPKQLAEFPAQLAEFLKSSARTLPSGLRCHVTQALILLINRDMVDISETLALFMELQTLGDRTLRNLAFTHVVHSIRRMNKKHKNEAKNRALQNILFSLLQQDDEARAKRALITLCELHRRKVWFDDRTANSICMACFHSSSRIMIAALSFLLDYEKIEDNDNDDSDASSGEDDPNPRTAQVVISKESIYKAHNKGTVASKKKKKAKLQRAIRSMKRQQRLSSENNNSNYYSPFNHLKDAQVKMMMLKVIARTVGLHRLILLNFYPFLQKYVQPHQRDITNLLAAAVQACHDLVPPDAVEPLFKQIVNQFVHDHSRPEAIAVGLNVIREICLRIPLLMNEDLLQDLVLYKKSHEKAVSIAARSLITLFREVCPSLLIKKDRGRPIDPKARPKAYGEVNIVSSVPGVELLEELNDDDDEDKEDSDDVDDLASRGSDDDSENEEMVSASDEGDQIYSDDAESEDGDVQDGSVDEDGDDAVDNDSGGGEGGDEDEDQEENDEDSYARAIINKVNKSTARKRKFSDFDGQLLAADTSLRALKKMTEEKLKKPPSDSTDGILSNEDFQRIKELTAKKDARIALNRQGFKVPSSDDLSAKRVDPATLEVHVRARLNKEERLALVRAGREDRESYKSRIAVKQKKTGGQSNRQKEHKKQMPLAAKRAKVARSRQEKKKKQSLSGKQFRGKKAWK

SEQ ID NO: 826 - protein, 771 aa, Oryza sativa subsp. japonica
  misc_feature (1)..(771): Public GI no. 50928937
  misc_feature (1)..(771)
  Functional Homolog of CDNA ID no. 36817505at SEQ ID no. 821with e-value of 1.1E-175 and percent identity of 56.80
MPRQHAPAFTPEAASASATGGAGERQSLPALQAKMKRDPEGYEEELRQLRRHFESSVFLFRQQAALASTSSSGGGGEVAKELGDLALFLAHVAPFYPDDLADLPDQIGGLLDTNARALPSGLRVHLVQALILLVNRKIVDLEDTMELFMELQVIGDRAVKKLAFSHIVHSIRRMNQTHKNEARNRKLQNILFTFLQGEEESRAKRAFTILCDLHRRRVWFDDRTANAICNACFHGSSRIMIAAISFLLGYENVEQEDDSDASSSEDEAQNPQIILSKEDVYKANHKGTAATKKKKKAKLQRVIRSMKRQQRKSTEDTGSNYYSPLTYLKDPQGFAEKLFSRLQKCNERFEVRMMMLKVIARTIGLHHLVLLNFYPYLQRYVQVPPDAVEPLFKQIVNQFVHDRSRPELMNEDLLQDLVLYKKSHEKAVSIAARSLITLFREICPSLLVKKDRGRPADPKARPKAFGEATIASDVPGAELLDEDFSSEGEGSDDESDAFDSNDEKELQSARGTKQNLDGSSEANKLDTDEGMKEEDQLSGDEDDTEELDEDQDISDNDSEENDDELELDSDMDEENDVSESDDDEELSEKLDDSDEGSDQDDDSDQDDKSKNSSRKANKRKLSDYIGQLNAADASLRALKKLAGAKKAEASCDEAGKILSDEDFKRIKELKAKKEAKLALAQHGLGKGHDTKSVTFKMPSSDQLSLKRVDPSKLEAHIKRKLTKEERLEMVKAGREDRGKYQARTAVKQKKLLLFLLYLYASHCVLDRWLEQ

SEQ ID NO: 827 - DNA, 3291 bp, Arabidopsis thaliana
  misc_feature (1)..(3291): Ceres CDNA ID no. 23544073
  misc_feature (1)..(3291): Also Known As  Ceres SEEDLINE ME11655
atgggatcttccatcaagatcaactcaatatccatagatctcgcaggtgctgccaacgagattgatatggtgaaatgtgatcatttttccatgcgtggattcgtagctgaaactcgtgagagagaccttagaaaatgttggccgttttcagaagagagtgttagtttagtagaccaacaaagctatactcttcctactttatctgttccaaagtttagatggtggcattgtatgagctgcatcaaagatatagatgctcatgggccaaaagattgtggactgcattcaaactcaaaagctattggaaactcttctgttatcgaaagtaaaagcaagttcaattcgctaactatcattgatcacgagaaagaaaagaaaactgatattgcagataatgctattgaggagaaagtgggtgtaaactgtgagaatgatgatcagacagctactacgtttctcaagaaagcacgtggtcgacctatgggtgcttctaatgttaggagcaagagcagaaagcttgtgagtccggagcaggtaggaaacaacagatctaaagaaaaactaaacaaaccatcgatggatattagcagctggaaagagaaacaaaatgtggatcaggctgtgacaacgttcggctcatctgaaattgctggtgtggttgaggatacaccacctaaggcaaccaagaatcataaaggcattcgcggtctgatggaatgcgataacgggtcatcagaaagtataaatcttgctatgagtgggttgcagcgtaggaaatctcgcaaggttcgtctactcagtgagttgcttggtaatacaaaaaccagtggtggtagtaacatcagaaaagaagagtctgctttgaagaaggaatcagttagaggtcgaaaaagaaagttgttacctgaaaacaattatgtcagccggatattgagtacaatgggtgcaacctctgaaaatgcttccaaaagttgtgactctgatcaaggtaatagtgaatcaactgatagtgggtttgacagaactccatttaagggtaagcagagaaacagaagatttcaggttgttgacgagtttgtaccatcacttccttgtgaaacttcacaagaaggtatcaaggagcatgatgcagatcctagtaagagatcaactcctgcgcactctttattcactggaaacgattctgttccttgtcctccgggtactcagagaacagagaggaagctcagtttacccaagaagaagacaaagaagcctgtaatcgataatgggaagagcactgtgatcagttttagtaacggcattgatggaagtcaagttaactcgcatactggtccttccatgaacacagtatcccaaactcgagacttattgaatgggaaaagggtgggcggtttatttgacaaccgtttggcttcagatggatatttcagaaaatatctctctcaggttaatgataagccgataacatctttgcatttgcaagacaatgattatgtgaggtcaagagacgcggaaccaaactgtcttcgagattttagttcctcttctaaatccagctcaggtggatggttgagaactggagtagatattgttgacttcagaaacaacaaccacaatacaaacagatcgtctttctcgaacttgaagctaagataccccccttcttctactgaagttgcggatttatctcgggtgctgcaaaaggatgcttctggtgcagatagaaaggggaagactgttatggtccaagaacatcatggagcaccaagaagccaaagtcacgatagaaaggagactacgactgaagagcaaaacaacgatgatattccaatggagatagtggagctcatggccaaaaaccagtacgagaggtgtcttcccgacaaagaagaagatgttagcaacaaacagccatcacaagaaacagcacacaaatccaagaatgctctactgattgatctcaatgaaacctacgataacgggatctcacttgaggacaacaacacatcaagaccaccaaaaccgtgtagtagcaacgcaaggagggaagaacattttcctatgggaagacagcagaactctcatgacttcttcccaataagtcagccttatgtgccttctccgtttgggatctttcctcctacccaagaaaaccgagccagctccatccggttttctggtcacaactgtcagtggcttgggaatttgccaactgtgggtaatcagaacccttctccatcctcatttcgggtattacgtgcttgtgatacttgccagagtgttcctaatcaatacagagaagcttctcatccaatttggccatcttccatgataccaccacagagtcaatacaagccagtttctttaaatattaatcagtcaacaaatccgggtacgctttcacaggcatctaacaatgaaaatacatggaacctcaactttgttgctgccaacgggaagcaaaaatgtgggcctaatccagaattttcatttggctgcaaacatgctgctggggttagtagtagtagtagtaggccaatagataacttttctagtgagagctctataccggcattgcatctactcagccttctggatcctcgcctgaggtcaacgactcccgctgaccaacacggaaacactaaatttactaaaagacattttccgccagccaaccagtccaaagagtttatagagcttcaaacaggggactctagtaagtcagcctactcaactaagcagataccttttgatctatacagcaagagattcacacaagagccttcccggaagagtttccccatcactccacctattgggacgtcttcactttcatttcaaaatgcttcatggagtcctcatcatcaagagaagaaaaccaagagaaaagacacctttgctcctgtttacaatactcatgaaaagccggtgtttgcaagcagcaacgaccaagcgaagttccagctgctgggagcatcgaattccatgatgcttcctttgaaatttcacatgacggataaagaaaagaaacaaaagagaaaagcagagagctgcaataacaatgcctctgcgggacctgtgaagaacagttctggacccattgtgtgcagcgtcaatagaaaccctgctgatttcaccattcctgaacctgggaatgtttacatgttaacgggtgaacatctgaaagtccgtaaacgcacaaccttcaagaaaaagccagccgtgtgtaagcaggacgcaatgaagcagaccaagaagccggtttgtccacctacacaaaatgcctaa

SEQ ID NO: 828 - protein, 1024 aa, Arabidopsis thaliana
  misc_feature (1)..(1024): Ceres CDNA ID no. 23544073
  misc_feature (1)..(1024): Also Known As  Ceres SEEDLINE ME11655
  misc_feature: Phenotype: Late Flowering Useful for delaying flowering time
  misc_feature: Phenotype: Dark Green Useful for increasing chlorophyll and photosynthetic capacity
  misc_feature: Phenotype: Oval Shaped Useful for making plants with increased biomass and foliage
  misc_feature: Phenotype: Serrate Margins Useful for making plants with increased biomass and foliage
  misc_feature: Phenotype: Short Petioles Useful for making smaller plants
MGSSIKINSISIDLAGAANEIDMVKCDHFSMRGFVAETRERDLRKCWPFSEESVSLVDQQSYTLPTLSVPKFRWWHCMSCIKDIDAHGPKDCGLHSNSKAIGNSSVIESKSKFNSLTIIDHEKEKKTDIADNAIEEKVGVNCENDDQTATTFLKKARGRPMGASNVRSKSRKLVSPEQVGNNRSKEKLNKPSMDISSWKEKQNVDQAVTTFGSSEIAGVVEDTPPKATKNHKGIRGLMECDNGSSESINLAMSGLQRRKSRKVRLLSELLGNTKTSGGSNIRKEESALKKESVRGRKRKLLPENNYVSRILSTMGATSENASKSCDSDQGNSESTDSGFDRTPFKGKQRNRRFQVVDEFVPSLPCETSQEGIKEHDADPSKRSTPAHSLFTGNDSVPCPPGTQRTERKLSLPKKKTKKPVIDNGKSTVISFSNGIDGSQVNSHTGPSMNTVSQTRDLLNGKRVGGLFDNRLASDGYFRKYLSQVNDKPITSLHLQDNDYVRSRDAEPNCLRDFSSSSKSSSGGWLRTGVDIVDFRNNNHNTNRSSFSNLKLRYPPSSTEVADLSRVLQKDASGADRKGKTVMVQEHHGAPRSQSHDRKETTTEEQNNDDIPMEIVELMAKNQYERCLPDKEEDVSNKQPSQETAHKSKNALLIDLNETYDNGISLEDNNTSRPPKPCSSNARREEHFPMGRQQNSHDFFPISQPYVPSPFGIFPPTQENRASSIRFSGHNCQWLGNLPTVGNQNPSPSSFRVLRACDTCQSVPNQYREASHPIWPSSMIPPQSQYKPVSLNINQSTNPGTLSQASNNENTWNLNFVAANGKQKCGPNPEFSFGCKHAAGVSSSSSRPIDNFSSESSIPALHLLSLLDPRLRSTTPADQHGNTKFTKRHFPPANQSKEFIELQTGDSSKSAYSTKQIPFDLYSKRFTQEPSRKSFPITPPIGTSSLSFQNASWSPHHQEKKTKRKDTFAPVYNTHEKPVFASSNDQAKFQLLGASNSMMLPLKFHMTDKEKKQKRKAESCNNNAS

SEQ ID NO: 829 - DNA, 657 bp, Arabidopsis thaliana
  misc_feature (1)..(657): Ceres CDNA ID no. 13610436
  misc_feature (1)..(657): Also Known As  Ceres SEEDLINE ME11742
aagaagttttctctacatccacaaaagaaaaaaagtttcccaaaaaacaaaaacatacacaagtttagatatggatcttgaattactacaagatttgtccaaattcaatttcccaacacccatcaagatccgatccaaaacctcaaaaacaaagaaggacgaaggtgatgacgacgaagatgacctccgctgcagcacacccacatcccaagaacacaagattcccgccgtcgtagactctccacctcctccgccgagaaaaccccggccaccaccgtcagcaccgtcggctacggcggctctgatgatcagatcgtgcaagaggaagcttttagtgtcgacttgtgagataatcatgaatcgggaagagattgaccgtttcttctcctccgtctacaatgagacgtcgactacggctaaacggcggagaagttacccttattgttctcgaagatgaggcttaattcaatatttacatttttttacagttttactggaaatattgtgaaattaattatctgttggtgttcggttttaaatatttttaatttaattatgaatatggatggataattttctgcaaccgcgcatattaatttcgcatggaggggtcgatgttgtaaattgagtaataaatgaaatttaattccaattgcc

SEQ ID NO: 830 - protein, 128 aa, Arabidopsis thaliana
  misc_feature (1)..(128): Ceres CDNA ID no. 13610436
  misc_feature (1)..(128): Also Known As  Ceres SEEDLINE ME11742
  misc_feature: Phenotype: Serrate Margins Useful for making plants with increased biomass and foliage
  misc_feature: Phenotype: Undulate Shaped Useful for making plants with increased biomass and foliage
MDLELLQDLSKFNFPTPIKIRSKTSKTKKDEGDDDEDDLRCSTPTSQEHKIPAVVDSPPPPPRKPRPPPSAPSATAALMIRSCKRKLLVSTCEIIMNREEIDRFFSSVYNETSTTAKRRRSYPYCSRR

SEQ ID NO: 831 - protein, 128 aa, Arabidopsis thaliana
  misc_feature (1)..(128): Public GI no. 21554247
  misc_feature (1)..(128)
  Functional Homolog of CDNA ID no. 13610436at SEQ ID no. 830with e-value of 1.1E-64 and percent identity of 98.44
MDLELLQDLSKFNFPTPIKIRSKTSKTKKDEGDDDEDDLSCSTPTSQEHKIPAVIDSPPPPPRKPRPPPSAPSATAALMIRSCKRKLLVSTCEIIMNREEIDRFFSSVYNETSTTAKRRRSYPYCSRR

SEQ ID NO: 832 - protein, 130 aa, Arabidopsis thaliana
  misc_feature (1)..(130): Ceres CLONE ID no. 112157
  misc_feature (1)..(130)
  Functional Homolog of CDNA ID no. 13610436at SEQ ID no. 830with e-value of 1.4E-56 and percent identity of 89.06
MLDEYYVGDIDTATVPITPIKIRSKTSKTKKDEGDDDEDDLSCSTPTSQEHKIPAVIDSPPPPPRKPRPPPSAPSATAALMIRSCKRKLLVSTCEIIMNREEIDRFFSSVYNETSTTAKRRRSYPYCSRR

SEQ ID NO: 833 - protein, 130 aa, Arabidopsis thaliana
  misc_feature (1)..(130): Ceres CLONE ID no. 150107
  misc_feature (1)..(130)
  Functional Homolog of CDNA ID no. 13610436at SEQ ID no. 830with e-value of 1.7E-55 and percent identity of 87.50
  misc_feature (18)..(18): Xaa is any aa, unknown, or other
  misc_feature (68)..(68): Xaa is any aa, unknown, or other
MLDEYYVGDIDTATVPIXPIKIRSKTSKTKKDEGDDDEDDLSCSTPTSQEHKIPAVIDSPPPPPRKPXPPPSAPSATAALMIRSCKRKLLVSTCEIIMNREEIDRFFSSVYNETSTTAKRRRSYPYCSRR

SEQ ID NO: 834 - protein, 129 aa, Brassica napus
  misc_feature (1)..(129): Ceres CLONE ID no. 1118497
  misc_feature (1)..(129)
  Functional Homolog of CDNA ID no. 13610436at SEQ ID no. 830with e-value of 8.1E-48 and percent identity of 77.34
MDDLELLQDLSQFNFPATIKIPSKTSKDNKDGDGDNDEVFSCSTPTSQEHKIPSVHDSPPPPPRKPRALPSKPSPTAALMIRSCKRKLLVSTPEIIMNKEEIDRFFSSVYSDTSTTAKRRRRYLYCARR

SEQ ID NO: 835 - protein, 119 aa, Brassica napus
  misc_feature (1)..(119): Ceres CLONE ID no. 1265409
  misc_feature (1)..(119)
  Functional Homolog of CDNA ID no. 13610436at SEQ ID no. 830with e-value of 5.1E-46 and percent identity of 80.67
  misc_feature (104)..(104): Xaa is any aa, unknown, or other
MDPDLLQDLSKFNFPATIKIQSKTTRNINEDDEEDGFSCSTPTSQEHKIPPVLDSPPPPPRKPRPQPSKPSATAALMIRSCKRKLLVSTCEGIMNREEIDRFFXSVYSDTSTTAKRRRS

SEQ ID NO: 836 - protein, 129 aa, Brassica napus
  misc_feature (1)..(129): Ceres CLONE ID no. 963126
  misc_feature (1)..(129)
  Functional Homolog of CDNA ID no. 13610436at SEQ ID no. 830with e-value of 9.2E-47 and percent identity of 75.78
MDDLELLQDLSQFNFPATIKIPSKTSKDNKDGDGDNDEGFSCSTPTSQEHKIPSVHDSPPPPPRKPRALPSKPSPTAALVIRSCKRKLLVSAPEIIMNKEEIDRFFSSVYSDTSTTAKRRRRYLYCARR

SEQ ID NO: 837 - protein, 128 aa, Brassica napus
  misc_feature (1)..(128): Ceres CLONE ID no. 968344
  misc_feature (1)..(128)
  Functional Homolog of CDNA ID no. 13610436at SEQ ID no. 830with e-value of 1.3E-49 and percent identity of 76.56
MDLDLLQDLSKVNIPTTIKIPSKTSRNINDGDEENEDGISCSTPTSEEHKIPSVLDSPPSPPRKPRPPPSKPSATAAMMIRSCKRKLLVSTCEIITNREEIDRFFTSVYSDTSTTAKRRRRYPHCPRR

SEQ ID NO: 838 - DNA, 746 bp, Arabidopsis thaliana
  misc_feature (1)..(746): Ceres CDNA ID no. 13489667
  misc_feature (1)..(746): Also Known As  Ceres SEEDLINE ME11746
  misc_feature (1)..(746): Also Known As  Ceres CLONE ID no. 4868
gattccttcttttgttttaaacttctttttgattctttctatatatacaaatacaaaatctcctcttcttcttgaaaaagctctttacgtttctctctctctctctaattgcctgctatgatgcaagaattaggcttacaacgtttctcaaacgacgtcgttcgcttagacctcactcctccttctcaaacctcatctacttctctttccatcgacgaagaggaatcaacggaagccaagatccgacggctgatatcggagcatcctgtgatcatcttcagtagatcttcatgttgcatgtgccacgtcatgaagagactcttagcaacgatcggcgtaatccccaccgtcatcgagctcgatgatcacgaggtttcctctcttcccacggctctacaagatgaatattccggtggcgtctccgtcgttggtcctccgccggcggttttcattggccgtgagtgcgtcggaggtcttgagtcccttgtcgctcttcacttaagtggtcaacttgttcctaagcttgtccaagttggagctctttgggtatgattgtaattttcatcgtcttcttacttgtgttaaaatcaataggcttttgcagtatcaaaagaaaacaaaaattagggtttcacttcaattggtcatgaaagccaaattctgattatcatcagatgatcataattaaacacccatgtagaaaatgaattatgaataattaaagatgtgtaattagtaaattttat

SEQ ID NO: 839 - protein, 144 aa, Arabidopsis thaliana
  misc_feature (1)..(144): Ceres CDNA ID no. 13489667
  misc_feature (1)..(144): Also Known As  Ceres SEEDLINE ME11746
  misc_feature (50)..(136): Pfam Name: Glutaredoxin Pfam Description: Glutaredoxin
  misc_feature: Phenotype: Glaucous Useful for making plants with enhanced abiotic stress tolerance
MMQELGLQRFSNDVVRLDLTPPSQTSSTSLSIDEEESTEAKIRRLISEHPVIIFSRSSCCMCHVMKRLLATIGVIPTVIELDDHEVSSLPTALQDEYSGGVSVVGPPPAVFIGRECVGGLESLVALHLSGQLVPKLVQVGALWV

SEQ ID NO: 840 - protein, 117 aa, Brassica napus
  misc_feature (1)..(117): Ceres CLONE ID no. 951261
  misc_feature (1)..(117)
  Functional Homolog of CDNA ID no. 13489667at SEQ ID no. 839with e-value of 1.4E-50 and percent identity of 90.60
MMQELGLERFSNDAVSLDLTPPSQTSSTSLSIDEEESSEAKIRRLITEHPVIIFSRSSCCMCHVMKRLLATIGVIPTVIELDDHEVSSLPLALGEEYSGGGSGVVPPPAVFIGRECV

SEQ ID NO: 841 - protein, 143 aa, Brassica napus
  misc_feature (1)..(143): Ceres CLONE ID no. 1258526
  misc_feature (1)..(143)
  Functional Homolog of CDNA ID no. 13489667at SEQ ID no. 839with e-value of 3.1E-62 and percent identity of 89.51
MMQELGLERFSNDVFPLDLTPPSQTSSTSLSIDEEESSEAKIRRLISEHPVIIFSRSSCCMCHVMKSLLSTIGVVPTVIELDDHEVSSLPMALEEEYSGGRSVVVPPPAVFIGREYVGGLESLVALHLSSHLVPKLVQVGALW

SEQ ID NO: 842 - protein, 140 aa, Zea mays
  misc_feature (1)..(140): Ceres CLONE ID no. 1380957
  misc_feature (1)..(140)
  Functional Homolog of CDNA ID no. 13489667at SEQ ID no. 839with e-value of 1.4E-59 and percent identity of 87.94
MQELSLECFSNEVVRLDLTPPSQTSPTSLSIDEEESSEAKIRRLISEHPVIIFSRSSCCMSHVMKRLLTTIGVVPTVIELDDHEVSSLPMALEEEFSGGVLPSPAVFIGRECVGGIESLVALHLSGHLVPKLVQVGALWV

SEQ ID NO: 843 - protein, 140 aa, Brassica napus
  misc_feature (1)..(140): Ceres CLONE ID no. 973721
  misc_feature (1)..(140)
  Functional Homolog of CDNA ID no. 13489667at SEQ ID no. 839with e-value of 3.4E-49 and percent identity of 84.68
  misc_feature (124)..(124): Xaa is any aa, unknown, or other
  misc_feature (125)..(125): Xaa is any aa, unknown, or other
  misc_feature (127)..(127): Xaa is any aa, unknown, or other
  misc_feature (135)..(135): Xaa is any aa, unknown, or other
MQELSLECFSNDVVRLDLTPPSQASPISLSIDEEESSESKIRRLISEHPVIIFSRSSCCMSHVMKRLLTTIGVVPTVIELDDHEVSSLPLALEEEFPGGVLPSPAVFIGRECVGGFESLVALHXXGXLVPKLVEXGALWV

SEQ ID NO: 844 - protein, 147 aa, Glycine max
  misc_feature (1)..(147): Ceres CLONE ID no. 587233
  misc_feature (1)..(147)
  Functional Homolog of CDNA ID no. 13489667at SEQ ID no. 839with e-value of 2.1E-40 and percent identity of 78.46
MQGLRRCSNDVVQLDLSTPTTTTTTTTTTTNNTNSSSFSSSCSLSIDVDESTEARIQRLISEHPVIIFTRSSCCMCHVMKKLLATIGVNPTVIELDDHEIAALPLPDHRTPAVFIGGSSVGGLESLVALHVSGHLVPKLVQVGALWV

SEQ ID NO: 845 - protein, 133 aa, Glycine max
  misc_feature (1)..(133): Ceres CLONE ID no. 1115876
  misc_feature (1)..(133)
  Functional Homolog of CDNA ID no. 13489667at SEQ ID no. 839with e-value of 2.3E-41 and percent identity of 70.68
MQGIGIGCCSNDVVGQLELSPTMSNSSSSLSMELDESPESRIQRLISEHPVIIFTRSSCCMCHVMKKLLATIGVHPTVIELDDHEIASLPLPDTTAPAAFIGGTCIGGLESLVALHVSGHLIPKLVQVGALWV

SEQ ID NO: 846 - protein, 136 aa, Glycine max
  misc_feature (1)..(136): Ceres CLONE ID no. 615004
  misc_feature (1)..(136)
  Functional Homolog of CDNA ID no. 13489667at SEQ ID no. 839with e-value of 2.9E-27 and percent identity of 51.88
MQGIGIGCCSNDVVGQLELSPTMSNSSSSLSMELDESPESRIQRLISEHPVIIFTRSSCCMCHVMKKLLATIGVHPTVIELDDHEIASLPLPDTTAPAAFIGGTCIGGLESLVALHVSGHLIPKLVQVGALWFGRI

SEQ ID NO: 847 - protein, 100 aa, Parthenium argentatum
  misc_feature (1)..(100): Ceres CLONE ID no. 1610049
  misc_feature (1)..(100)
  Functional Homolog of CDNA ID no. 13489667at SEQ ID no. 839with e-value of 9.1E-27 and percent identity of 68.04
MRIQRLITENPVIIFSRSACCMCHVMKKLFSSLGVHPTVIELEEDEIHALPASQPEDGGETEAPAVFIGGTRVGGLEGLVGLHLSGQLVPKLVEVGVLEL

SEQ ID NO: 848 - protein, 124 aa, Glycine max
  misc_feature (1)..(124): Ceres CLONE ID no. 665805
  misc_feature (1)..(124)
  Functional Homolog of CDNA ID no. 13489667at SEQ ID no. 839with e-value of 3.1E-30 and percent identity of 64.35
MNSTEEGMQGIGIGIGCFQNDVVGQLELSPTMSNSSSSLSMELDESPESRIQRLISEHPVIIFTRSSCCMCHVMKKLLATIGVHPTVIELDDQEIAALPDTSAPSAFIGGTCIGGLESLVGLHV

SEQ ID NO: 849 - protein, 154 aa, Triticum aestivum
  misc_feature (1)..(154): Ceres CLONE ID no. 685101
  misc_feature (1)..(154)
  Functional Homolog of CDNA ID no. 13489667at SEQ ID no. 839with e-value of 4.8E-18 and percent identity of 48.33
MQAVAGIRRGLTIDPAGEEEAPAQRFGRLVRESPVVIFARRGCYMAHVMKSLLAAVGAHATVIELEGPRRGARGGGGRRPRGRAGALRRGRAGXRPGGPHGAPLQRPPRPTPPRGRSPPRLASSRIPCSPSSPATPSHVRVHAWSPSPSPCMYI

SEQ ID NO: 850 - protein, 135 aa, Oryza sativa subsp. japonica
  misc_feature (1)..(135): Public GI no. 50908919
  misc_feature (1)..(135)
  Functional Homolog of CDNA ID no. 13489667at SEQ ID no. 839with e-value of 2.9E-20 and percent identity of 41.98
MQYGAAAEQAWYMPAAAPAPMVESAVARVERLASESAVVVFSVSSCCMCHAVKRLFCGMGVHPTVHELDLDPRGRELERALARLVGYGGPAAASPPVVPVVFIGGKLVGAMDRVMAAHINGSLVPLLKEAGALWL

SEQ ID NO: 851 - protein, 103 aa, Oryza sativa
  misc_feature (1)..(103): Public GI no. 58737210
  misc_feature (1)..(103)
  Functional Homolog of CDNA ID no. 13489667at SEQ ID no. 839with e-value of 1.2E-17 and percent identity of 49.00
MDRVNRLAAQRAVVIFSMSSCCMCHTVTRLFCELGVNPTVVELDEDPRGKEMEKALARLLGRSPAVPAVFIGGRLVGSTDKVMSLHLSGNLVPLLRNAGALWV

SEQ ID NO: 852 - protein, 137 aa, Triticum aestivum
  misc_feature (1)..(137): Ceres CLONE ID no. 1330739
  misc_feature (1)..(137)
  Functional Homolog of CDNA ID no. 13489667at SEQ ID no. 839with e-value of 3E-18 and percent identity of 39.69
MLRMQQQVEGVVGGGIMAEAEEAAVYERVARMASGNAVVVFSASGCCMCHVVKRLLLGLGVGPTVYELDQMGGAGREIQAALAQLLPPGPGAGHHQQPPVPVVFVGGRLLGGVEKVMACHINGTLVPLLKDAGALWL

SEQ ID NO: 853 - protein, 135 aa, Oryza sativa subsp. japonica
  misc_feature (1)..(135): Public GI no. 50923897
  misc_feature (1)..(135)
  Functional Homolog of CDNA ID no. 13489667at SEQ ID no. 839with e-value of 2.1E-18 and percent identity of 44.04
MQYGAAAAEQAWYMPAAAMVVAAAAETAAERVERLASESAVVVFSVSSCCMCHAVKRLFCGMGVHPAVHELDLDPRGRDLERALARLVGAGGAAAAAVPVVFIGGKLVGAMDRVMAAHINGSLVPLLKEAGALWL

SEQ ID NO: 854 - protein, 102 aa, Ricinus communis
  misc_feature (1)..(102): Public GI no. 1707981
  misc_feature (1)..(102)
  Functional Homolog of CDNA ID no. 13489667at SEQ ID no. 839with e-value of 5.6E-12 and percent identity of 42.27
MAMTKTKELVSSNAVVVFSKTYCPYCTSVKKLLDQLGAKYKVVELDTESDGSEIQTALAEWTGQRTVPNVFIGGKHIGGCDSTTAKHSQGQLVPLLTEAGAV

SEQ ID NO: 855 - DNA, 970 bp, Arabidopsis thaliana
  misc_feature (1)..(970): Ceres CDNA ID no. 12332453
  misc_feature (1)..(970): Also Known As  Ceres SEEDLINE ME11780
  misc_feature (1)..(970): Also Known As  Ceres CLONE ID no. 1265
aaaacattttgatattctcttcgaccagatcaatttttcggttagggttcttcgccgaaccattggctactttgctagatctctgaaggtgtaaaagagctatggagaatgggaaaagagacagacaagacatggaagtgaataccacaccgaggaagcctcgtgtactactcgctgcaagtggaagcgtcgctgctatcaaattcggcaatctctgccattgcttcaccgaatgggcagaagtcagagccgtcgttacgaaatcatctctacatttcctcgataaactctctctcccacaagaagtgactctgtatactgatgaagatgaatggtctagctggaacaagatcggtgatcctgtccttcacatcgagcttagacgttgggctgatgttttagtcattgctcctttgtctgctaacaccttaggcaagattgctggtgggctttgtgataatcttctgacttgcattatacgagcttgggactataccaaaccactgtttgttgctccagctatgaatactttgatgtggaacaatcctttcactgaaaggcatcttttgtctcttgatgaactgggaatcacacttattcctcctatcaagaagagacttgcctgtggagactacggtaatggagctatggctgagccctctcttatctattccactgtcagactcttctgggagtctcaggctcatcagcaaaccggtggaactagttaaaaccatgatttccacaacatgcattttgtggaaaatcatctgttttcactatcttagataatagtagattttatcagtctgtttgcttttcttgtacatctcaaaatagctgtctggattgatgtatctggaggaccatttgcactactagctccactctgtttctgtagaaatgtctatgtttcttttcctcgctcttaaatgttgtcttcaattctgctaatagctcactgaacttt

SEQ ID NO: 856 - protein, 209 aa, Arabidopsis thaliana
  misc_feature (1)..(209): Ceres CDNA ID no. 12332453
  misc_feature (1)..(209): Also Known As  Ceres SEEDLINE ME11780
  misc_feature (1)..(209): Also Known As  Ceres CLONE ID no. 1265
  misc_feature (20)..(140): Pfam Name: Flavoprotein Pfam Description: Flavoprotein
  misc_feature: Phenotype: Late Flowering Useful for delaying flowering time
  misc_feature: Phenotype: Long Petioles Useful for making plants that grow better in shade
MENGKRDRQDMEVNTTPRKPRVLLAASGSVAAIKFGNLCHCFTEWAEVRAVVTKSSLHFLDKLSLPQEVTLYTDEDEWSSWNKIGDPVLHIELRRWADVLVIAPLSANTLGKIAGGLCDNLLTCIIRAWDYTKPLFVAPAMNTLMWNNPFTERHLLSLDELGITLIPPIKKRLACGDYGNGAMAEPSLIYSTVRLFWESQAHQQTGGTS

SEQ ID NO: 857 - protein, 210 aa, Zea mays
  misc_feature (1)..(210): Ceres CLONE ID no. 1065020
  misc_feature (1)..(210)
  Functional Homolog of CDNA ID no. 12332453at SEQ ID no. 856with e-value of 3.8E-105 and percent identity of 93.78
MENGKRDRDDMEVQPSPRKPRVLLAASGSVAAIKFGNLCHCFTEWAEVRAVVSKSSLHFLDKLSLPPEVTLYTDEEEWSSWNKIGDPVLHIELRRWADVMVIAPLSANTLAKIAGGMCDNLLTCIIRAWDYSKPLFVAPAMNTLMWNNPFTERHLLSLDELGITLIPPIKKRLACGDYGNGAMAEPSLIYSTVRLFWESQGHQQSGGGTS

SEQ ID NO: 858 - protein, 195 aa, Zea mays
  misc_feature (1)..(195): Ceres CLONE ID no. 1381401
  misc_feature (1)..(195)
  Functional Homolog of CDNA ID no. 12332453at SEQ ID no. 856with e-value of 7.3E-102 and percent identity of 91.22
MEVQAAPRKPRVLLAASGSVAAIKFGNLCHCFAEWAEVRAVVSKSSLHFLDRLSLPREVTLYTDEDEWSTWNKIGDPVLHIELRRWADVMVIAPLSANTLAKIAGGLCDNLLTCIVRAWDYSKPVFVAPAMNTLMWNNPFTERHLCSLDELGITLIPPIKKRLACGDYGNGAMAEPSLIYSTVRLFWESQVRQQS

SEQ ID NO: 859 - DNA, 654 bp, Populus balsamifera subsp. trichocarpa
  misc_feature (1)..(654): Ceres GDNA ANNOT ID no. 1473760
atggaatactcggaacctgtgacagcagagatggagacagcacaggttaatgctgtcgccgcggccgccggtcctaggaaacctaggattctactagcggcaagtgggagtgtagctgctattaaatttgggaatctttgtcattgtttttctgaatgggctgaagtgaaagcggttgctactagggcttctttgcatttcattgatagagctgcattgcctaaggatgttgtgctctacactgacgaggatgaatggtcgagttggaataagataggagatactgtgcttcatattgagttaagacggtgggctgatatcatggttattgctcctttatctgctaatacgcttggcaagattgctggggggttgtgtgacaatctgctgacctgcattgtccgagcatgggattacagcaagccactttttgttgcgccggctatgaacactttcatgtggagcaaccctttcacagaacggcatctcatgtcaattgatgagcttggaatttccttgatcccacctgtttcaaagaggctggcatgtggagattatgggaatggtgcaatggctgaaccttctctaatctactcaactgtaagactattcttggagtcacggagtcaagccggtgatagaagagttggttaa

SEQ ID NO: 860 - protein, 217 aa, Populus balsamifera subsp. trichocarpa
  misc_feature (1)..(217): Ceres GDNA ANNOT ID no. 1473760
  misc_feature (1)..(217)
  Functional Homolog of CDNA ID no. 12332453at SEQ ID no. 856with e-value of 2E-87 and percent identity of 84.86
MEYSEPVTAEMETAQVNAVAAAAGPRKPRILLAASGSVAAIKFGNLCHCFSEWAEVKAVATRASLHFIDRAALPKDVVLYTDEDEWSSWNKIGDTVLHIELRRWADIMVIAPLSANTLGKIAGGLCDNLLTCIVRAWDYSKPLFVAPAMNTFMWSNPFTERHLMSIDELGISLIPPVSKRLACGDYGNGAMAEPSLIYSTVRLFLESRSQAGDRRVG

SEQ ID NO: 861 - protein, 220 aa, Oryza sativa subsp. japonica
  misc_feature (1)..(220): Public GI no. 51090974
  misc_feature (1)..(220)
  Functional Homolog of CDNA ID no. 12332453at SEQ ID no. 856with e-value of 1.1E-76 and percent identity of 77.72
MTTSESVQETLGLDFPHPSKPRVLLAASGSVAAIKFESLCRSFSEWAEVRAVATKASLHFIDRTSLPSNIILYTDDDEWSTWKKIGDEVLHIELRKWADIMVIAPLSANTLAKIAGGLCDNLLTCIVRAWDYSKPLFVAPAMNTFMWNNPFTSRHLETINLLGISLVPPITKRLACGDYGNGAMAEPSVIDSTVRLACKRQPLNTNSSPVVPAGRNLPSS

SEQ ID NO: 862 - protein, 220 aa, Glycine max
  misc_feature (1)..(220): Ceres CLONE ID no. 558051
  misc_feature (1)..(220)
  Functional Homolog of CDNA ID no. 12332453at SEQ ID no. 856with e-value of 1.2E-76 and percent identity of 68.90
MATSEPVQESLVVHYSQPSRPRVLLAASGSVAAIKFESLCRSFSEWADVRAVATTSSLHFVDRSSLPSGIVLYTDDDEWSTWKKIGDEVLHIELRKWADVMVIAPLSANTLAKIAGGLCDNLLTCIVRAWDYSKPLFVAPAMNTLMWNNPFTERHLHTINQLGIALIPPVTKRLACGDYGNGAMAETSQIHTSVRLACKTQPHDASSSLAGPVSNNRPSS

SEQ ID NO: 863 - protein, 211 aa, Glycine max
  misc_feature (1)..(211): Ceres CLONE ID no. 1047194
  misc_feature (1)..(211)
  Functional Homolog of CDNA ID no. 12332453at SEQ ID no. 856with e-value of 2.5E-86 and percent identity of 75.74
MAGSEPVRAEGETMAVDAAPRKPRILLAASGSVAAVKFANLCHCFSEWADVRAVSTSASLHFIDRAAMPKDVILYTDDNEWSSWKKLGDSVLHIELRKWADIMVIAPLSANTLGKIAGGLCDNLLTCIVRAWDYSKPFFVAPAMNTFMWNNPFTERHLISIDELGISLIPPVTKRLACGDYGNGAMAEPSTIYSTVRLFYESKAQQGNGDI

SEQ ID NO: 864 - protein, 211 aa, Glycine max; identical to SEQ ID NO: 863
  misc_feature (1)..(211): Ceres CLONE ID no. 1248638
  misc_feature (1)..(211)
  Functional Homolog of CDNA ID no. 12332453at SEQ ID no. 856with e-value of 6.9E-42 and percent identity of 65.57

SEQ ID NO: 865 - protein, 215 aa, Triticum aestivum
  misc_feature (1)..(215): Ceres CLONE ID no. 615686
  misc_feature (1)..(215)
  Functional Homolog of CDNA ID no. 12332453at SEQ ID no. 856with e-value of 2.3E-75 and percent identity of 67.63
MATSEPVQESWELEPSRPRVLLAASGSVAAIKFESLCRVFSEWAEVRAVATKSSLHFIERSSLPSDVILYTDDDEWSTWTKIGDEVLHIELRKWADIMVIAPLSANTLAKIAGGLCDNLLTCIVRAWDYKKPIFAAPAMNTFMWNNPFTARHIETINQLGISLVPPTTKRLACGDYGNGAMAEPSQIHTTVRLACKSHTFGTGNSPAIPSSSHPV

SEQ ID NO: 866 - protein, 198 aa, Glycine max
  misc_feature (1)..(198): Ceres CLONE ID no. 524043
  misc_feature (1)..(198)
  Functional Homolog of CDNA ID no. 12332453at SEQ ID no. 856with e-value of 1.7E-61 and percent identity of 71.97
  misc_feature (29)..(29): Xaa is any aa, unknown, or other
  misc_feature (37)..(37): Xaa is any aa, unknown, or other
  misc_feature (42)..(42): Xaa is any aa, unknown, or other
  misc_feature (44)..(44): Xaa is any aa, unknown, or other
  misc_feature (54)..(54): Xaa is any aa, unknown, or other
  misc_feature (148)..(148): Xaa is any aa, unknown, or other
  misc_feature (149)..(149): Xaa is any aa, unknown, or other
  misc_feature (155)..(155): Xaa is any aa, unknown, or other
  misc_feature (165)..(165): Xaa is any aa, unknown, or other
  misc_feature (177)..(177): Xaa is any aa, unknown, or other
  misc_feature (188)..(188): Xaa is any aa, unknown, or other
  misc_feature (192)..(192): Xaa is any aa, unknown, or other
  misc_feature (196)..(196): Xaa is any aa, unknown, or other
MAVDAAPRKPRILLAASGSVAAVKFANLXHCFSEWAXVRAVXTXASLHFIDRAXMPKDVILYTDDNEWSSWKKLGDSVLHIELRKWADIMVIAPLSANTLGKIAGGLCDNLLTCIVRAWDYSKPFFVAPAMNTFMWNNLFTERHLISXXELGISXIPPVTKRLAXGDYGNGAMAEPXTIYSTVRLFYXSKAXQGNXDI

SEQ ID NO: 867 - DNA, 825 bp, Arabidopsis thaliana
  misc_feature (1)..(825): Ceres CDNA ID no. 23551244
  misc_feature (1)..(825): Also Known As  Ceres SEEDLINE ME11856
atggaagaagaaggttatcagtgggcaagaaggtgtggaaacaacgccgttgaagatccttttgtttatgagccacctcttttctttctgcctcaagaccaacatcatatgcatgggctcatgccaaatgaagatttcattgccaacaagttcgtcacatcaacactttactccggtccacgaatccaagatattgcaaacgctctggccttggtcgaacccctgacccacccagtccgagaaatctctaaatcaacagttcctcttttggaaagaagtactttgagcaaggtggataggtacactttaaaggtgaagaacaatagtaatggaatgtgtgatgatggatacaaatggagaaaatatggccaaaaatcaatcaaaaatagccctaacccaaggagttattacaagtgcacaaacccaatatgcaatgcaaagaagcaagtggagagatcaattgatgagtctaacacatatatcattacctacgaaggtttccacttccactatacttaccctttcttcctacccgataagacacgtcaatggcccaataaaaaaacgaaaatacataaacataatgctcaagatatgaacaaaaaatctcaaacccaagaagagagcaaagaagcacaattaggtgagctcaccaaccaaaatcatccagtcaataaagcccaagaaaacacaccggcaaatctcgaagagggattgttttttccggttgatcagtgtcggccgcaacaagggcttctagaagatgtggtagctccggcaatgaaaaatattcctaccagggacagtgttttgacagcttcttga

SEQ ID NO: 868 - protein, 274 aa, Arabidopsis thaliana
  misc_feature (1)..(274): Ceres CDNA ID no. 23551244
  misc_feature (1)..(274): Also Known As  Ceres SEEDLINE ME11856
  misc_feature (113)..(172): Pfam Name: WRKY Pfam Description: WRKY DNA -binding domain
  misc_feature: Phenotype: Curled 2 Useful for making plants with altered leaf shape e.g., curled leaves
  misc_feature: Phenotype: Lanceolate Shaped Useful for making plants with increased biomass and foliage
MEEEGYQWARRCGNNAVEDPFVYEPPLFFLPQDQHHMHGLMPNEDFIANKFVTSTLYSGPRIQDIANALALVEPLTHPVREISKSTVPLLERSTLSKVDRYTLKVKNNSNGMCDDGYKWRKYGQKSIKNSPNPRSYYKCTNPICNAKKQVERSIDESNTYIITYEGFHFHYTYPFFLPDKTRQWPNKKTKIHKHNAQDMNKKSQTQEESKEAQLGELTNQNHPVNKAQENTPANLEEGLFFPVDQCRPQQGLLEDVVAPAMKNIPTRDSVLTAS

SEQ ID NO: 869 - DNA, 1273 bp, Arabidopsis thaliana
  misc_feature (1)..(1273): Ceres CDNA ID no. 12658070
  misc_feature (1)..(1273): Also Known As  Ceres SEEDLINE ME11863
cacacttaaagctttcgtctttacctcttcccttctctctctctatctaaaaagagttccgagaagaagatcatcatcaatggcgacttctctcttcttcatgtcaacagatcaaaactccgtcggaaacccaaacgatcttctgagaaacacccgtcttgtcgtcaacagctccggcgagatccggacagagacactgaagagtcgtggtcggaaaccaggatcgaagacaggtcagcaaaaacagaagaaaccaacgttgagaggaatgggtgtagcaaagctcgagcgtcagagaatcgaagaagaaaagaagcaactcgccgccgccacagtcggagacacgtcatcagtagcatcgatctctaacaacgctacccgtttacccgtaccggtagacccgggtgttgtgctacaaggcttcccaagctcactcgggagcaacaggatctattgtggtggagtcgggtcgggtcaggttatgatcgacccggttatttctccatggggttttgttgagacctcctccactactcatgagctctcttcaatctcaaatcctcaaatgtttaacgcttcttccaataatcgctgtgacacttgcttcaagaagaaacgtttggatggtgatcagaataatgtagttcgatccaacggtggtggattttcgaaatacacaatgattcctcctccgatgaacggctacgatcagtatcttcttcaatcagatcatcatcagaggagccaaggtttcctttatgatcatagaatcgctagagcagcttcagtttctgcttctagtactactattaatccttatttcaacgaggcaacaaatcatacgggaccaatggaggaatttgggagctacatggaaggaaaccctagaaatggatcaggaggtgtgaaggagtacgagttttttccggggaaatatggtgaaagagtttcagtggtggctaaaacgtcgtcactcgtaggtgattgcagtcctaataccattgatttgtccttgaagctttaaatgttttatctttctatattgatttaaacaaaatcgtctctttaaagaaaaaacattttaagtagatgaaagtaagaaacagaagaaaaaaaagagagagccttttttggtgtatgcatctgagagctgagtcgaaagaaagattcagcttttggattacccttttggttgtttattatgagattctaacctaaacactcagacatatatgttctgttctcttccttaattgttgtcatgaaacttctc

SEQ ID NO: 870 - protein, 314 aa, Arabidopsis thaliana
  misc_feature (1)..(314): Ceres CDNA ID no. 12658070
  misc_feature (1)..(314): Also Known As  Ceres SEEDLINE ME11863
  misc_feature: Phenotype: Curled 5 Useful for making plants with altered leaf shape e.g., curled leaves
MATSLFFMSTDQNSVGNPNDLLRNTRLVVNSSGEIRTETLKSRGRKPGSKTGQQKQKKPTLRGMGVAKLERQRIEEEKKQLAAATVGDTSSVASISNNATRLPVPVDPGVVLQGFPSSLGSNRIYCGGVGSGQVMIDPVISPWGFVETSSTTHELSSISNPQMFNASSNNRCDTCFKKKRLDGDQNNVVRSNGGGFSKYTMIPPPMNGYDQYLLQSDHHQRSQGFLYDHRIARAASVSASSTTINPYFNEATNHTGPMEEFGSYMEGNPRNGSGGVKEYEFFPGKYGERVSVVAKTSSLVGDCSPNTIDLSLKL

SEQ ID NO: 871 - DNA, 1493 bp, Arabidopsis thaliana
  misc_feature (1)..(1493): Ceres CDNA ID no. 12700063
  misc_feature (1)..(1493): Also Known As  Ceres SEEDLINE ME11923
aaaatccctaaaagttttgggggaaagaagaaagaaggaagacgatgatgatgctcagaatccgaagcagagatggactggagagagtcacagcggagggagctcatatcactgtttcccagctcaaaaccttgatcgcggatcagcttcagatccctctccataagcagaccttatccaccaatcgtgatctcctcctcgccaaaactcccgctgatctactcgccttcaccgacctcacggacccaaacctccccctctcctctctcaacctcggccatggctctatgctctacctcgcctacgatggcgagcgctccattcctggagctcctcccgttactcctgccggatccttcgggaggaagatgaccgtcgatgacttgatcgcccgccagatgcgcgtcactcgtcaggagacgtctcactgcgactccgtctccttcgatcgcgatgccgccaacgctttccagcactacgtcaatgagtctctagcttttgccgtcaagcgcggcggctttatgtacggcaccgtcaccgaggaaggacaggtggaagttgatttcatttacgagccgccccagcaaggcacggaggctaatcttattctgatgagagatgctgatgaagagaagcgcgtggacgcaatcgccatgggcttggggatgaggagggtcggtttcatttttaaccagaccgtggtgcaggacaagactgaatacactctgtccaacgccgaggtgctacaggcggcggagcttcacgccgagagcgagctgaaggagtgggtcacggcggtggtgaagcttgaggtgaatgaggatggtggcgccgatgtccatttcgaggcgtttcaaatgagtgatatgtgcatcaggctgttcaaggaagagtggttcgagacggagattatgccggacgatgatccaaagctctctaagatgaagaaggaggtggttgttggtgtgaaggatcttaaggaggtagataacgatttcttcctcgttctcgtcaggatcttggatcaccaggggcctctgtcatcaacattcccaatagagaaccggagcagtcgagcaacgatgcgggctctaaaaacacatctggaccgggcaaagagcttgccgttggtgaagaagatgtcagattttcatctgcttctctttgtggctcagtttctggacgtgtcatcggacgtccctgctttagccgagtgtgtgcgtctgcagtcgcctgtcccagagggctatgcgttgctcatcgaatcaatggccaacacttgttaatttttgtgtcattgttttttggttcttgatacagtatatcatgttcgttttatggtccagaaaatcttttttactagttgacaaatgaaaaatctctagtgtactcgtgatgtatttgattcaagtttgggggttaatttaagttatcaacaacttgtagaaacaaagttaattcacagagtaataaatcattctaataggtatgct

SEQ ID NO: 872 - protein, 413 aa, Arabidopsis thaliana
  misc_feature (1)..(413): Ceres CDNA ID no. 12700063
  misc_feature (1)..(413): Also Known As  Ceres SEEDLINE ME11923
  misc_feature (156)..(410): Pfam Name: NPL4 Pfam Description: NPL4 family
  misc_feature: Phenotype: Cup-shaped Useful for making plants with altered leaf shape e.g., curled leaves
  misc_feature: Phenotype: Oval Shaped Useful for making plants with increased biomass and foliage
MMMLRIRSRDGLERVTAEGAHITVSQLKTLIADQLQIPLHKQTLSTNRDLLLAKTPADLLAFTDLTDPNLPLSSLNLGHGSMLYLAYDGERSIPGAPPVTPAGSFGRKMTVDDLIARQMRVTRQETSHCDSVSFDRDAANAFQHYVNESLAFAVKRGGFMYGTVTEEGQVEVDFIYEPPQQGTEANLILMRDADEEKRVDAIAMGLGMRRVGFIFNQTVVQDKTEYTLSNAEVLQAAELHAESELKEWVTAVVKLEVNEDGGADVHFEAFQMSDMCIRLFKEEWFETEIMPDDDPKLSKMKKEVVVGVKDLKEVDNDFFLVLVRILDHQGPLSSTFPIENRSSRATMRALKTHLDRAKSLPLVKKMSDFHLLLFVAQFLDVSSDVPALAECVRLQSPVPEGYALLIESMANTC

SEQ ID NO: 873 - DNA, 1236 bp, Populus balsamifera subsp. trichocarpa
  misc_feature (1)..(1236): Ceres GDNA ANNOT ID no. 1497958
atggtgatggttcgaatccgcagcagagacgggctggaacgcgtctccatcgacaacacaaacatcacagtttcccaactcaaaactctaatccaaaaccaactccaaatccctatccgcagccaaaccctctctaccaaccaaagcctcctcttagccaaatcaccctccgatctcctcaaattcactgacatgtccaaccctgacactcctctctcttccctcagcatctctcacggctcccttatcttcttagcctacgatggcgagagaactattgccggccccgctgttcgacctgctggttctttcggccggaagatgacaatcgacgatcttattgccaaacagatgagagtcaccaggcaagaaaatccccactgcgattctgtctcgtttgatcgcgattgcgctaatgcgtttcagcattatgttaatgaaacgctcgcttttgctgttaaaagaggtgggtttatgtacggcacggtgtcggaggaggggaaggttgaagtcgatttcatatacgagccaccgcagcaggggactgaagaggttctgatgctcttgagagattccgatgaagaaaaattagtggaggcgattacggcgtgtttgggaatgaggagagtggggtttatttttacgcagactataatgcaggacaaaaaggactatacgttgtcgcatagggaagttcttcaggcggcggagctgcatgctgagagtgaattgaaagagtgggttactgcggtggtgaagttggaggtaagtgaggatgggggagccgatgtgcatttcgaggcgtttcagatgagtgatatgtgtattaggctgtttaaagaaggatggtttgagacggagattggggaagatgccgatcctaagttgtctaaaatgaagaaagatgtggttgttggtaccaaggatgttaaggaggtcgataatgattttttcttggtcgttgtcaagattttagatcacctgggccctctttcatcaaccttccccattgagaacaggatcacacaagtgacaatgagagcattgaggagtcatctggaccgtgcaaagaatcttccatttgtgaagagaatttctgattttcatctcttgctatttctggccaagtatctggacctcaattctgatgttccggcattagcagagtgtgtgcttgcacagacagcagtaccagagggttatcagatcctaattgagtccatggctactacttga

SEQ ID NO: 874 - protein, 409 aa, Populus balsamifera subsp. trichocarpa
  misc_feature (1)..(409): Ceres GDNA ANNOT ID no. 1497958
  misc_feature (1)..(409)
  Functional Homolog of CDNA ID no. 12700063at SEQ ID no. 872with e-value of 9.1E-170 and percent identity of 78.00
MVRIRSRDGLERVSIDNTNITVSQLKTLIQNQLQIPIRSQTLSTNQSLLLAKSPSDLLKFTDMSNPDTPLSSLSISHGSLIFLAYDGERTIAGPAVRPAGSFGRKMTIDDLIAKQMRVTRQENPHCDSVSFDRDCANAFQHYVNETLAFAVKRGGFMYGTVSEEGKVEVDFIYEPPQQGTEEVLMLLRDSDEEKLVEAITACLGMRRVGFIFTQTIMQDKKDYTLSHREVLQAAELHAESELKEWVTAVVKLEVSEDGGADVHFEAFQMSDMCIRLFKEGWFETEIGEDADPKLSKMKKDVVVGTKDVKEVDNDFFLVVVKILDHLGPLSSTFPIENRITQVTMRALRSHLDRAKNLPFVKRISDFHLLLFLAKYLDLNSDVPALAECVLAQTAVPEGYQILIESMATT

SEQ ID NO: 875 - DNA, 1338 bp, Populus balsamifera subsp. trichocarpa
  misc_feature (1)..(1338): Ceres GDNA ANNOT ID no. 1444972
atggtgatggttcgaatccgcagcagagacgggctggaacgcgtctccatcgacaacacaaacatcacagtttcccaactcaaaactctaatccaaaaccaactccaaatccctatccgcagccaaaccctctctaccaaccaaagcctcctcttagccaaatcaccctccgatctcctcaaattcactgacatgtccaaccctgacactcctctctcttccctcagcatctctcacggctcccttatcttcttagcctacgatggcgagagaactattgccggccccgctgttcgacctgctggttctttcggccggaagatgacaatcgacgatcttattgccaaacagatgagagtcaccaggcaagaaaatccccactgcgattctgtctcgtttgatcgcgattgcgctaatgcgtttcagcattatgttaatgaaacgctcgcttttgctgttaaaagaggtgggtttatgtacggcacggtgtcggaggaggggaaggttgaagtcgatttcatatacgagccaccgcagcaggggactgaagaggttctgatgctcttgagagattccgatgaagaaaaattagtggaggcgattacggcgtgtttgggaatgaggagagtggggtttatttttacgcagactataatgcaggacaaaaaggactatacgttgtcgcatagggaagttcttcaggcggcggagctgcatgctgagagtgaattgaaagagtgggttactgcggtggtgaagttggaggtaagtgaggatgggggagccgatgtgcatttcgaggcgtttcagatgagtgatatgtgtattaggctgtttaaagaaggatggtttgagacggagattggggaagatgccgatcctaagttgtctaaaatgaagaaagatgtggttgttggtaccaaggatgttaaggaggtcgataatgattttttcttggtcgttgtcaagattttagatcacctgatcgtttgctcaacaaatatcatggaaaaacgtgctggcattagacaatcacagttatgtttatgtgttatgcaaaaacaagatggaatgtttgctgttgagggccctctttcatcaaccttccccattgagaacaggatcacacaagtgacaatgagagcattgaggagtcatctggaccgtgcaaagaatcttccatttgtgaagagaatttctgattttcatctcttgctatttctggccaagtatctggacctcaattctgatgttccggcattagcagagtgtgtgcttgcacagacagcagtaccagagggttatcagatcctaattgagtccatggctactacttga

SEQ ID NO: 876 - protein, 443 aa, Populus balsamifera subsp. trichocarpa
  misc_feature (1)..(443): Ceres GDNA ANNOT ID no. 1444972
  misc_feature (1)..(443)
  Functional Homolog of CDNA ID no. 12700063at SEQ ID no. 872with e-value of 3E-162 and percent identity of 78.00
MVRIRSRDGLERVSIDNTNITVSQLKTLIQNQLQIPIRSQTLSTNQSLLLAKSPSDLLKFTDMSNPDTPLSSLSISHGSLIFLAYDGERTIAGPAVRPAGSFGRKMTIDDLIAKQMRVTRQENPHCDSVSFDRDCANAFQHYVNETLAFAVKRGGFMYGTVSEEGKVEVDFIYEPPQQGTEEVLMLLRDSDEEKLVEAITACLGMRRVGFIFTQTIMQDKKDYTLSHREVLQAAELHAESELKEWVTAVVKLEVSEDGGADVHFEAFQMSDMCIRLFKEGWFETEIGEDADPKLSKMKKDVVVGTKDVKEVDNDFFLVVVKILDHLIVCSTNIMEKRAGIRQSQLCLCVMQKQDGMFAVEGPLSSTFPIENRITQVTMRALRSHLDRAKNLPFVKRISDFHLLLFLAKYLDLNSDVPALAECVLAQTAVPEGYQILIESMATT

SEQ ID NO: 877 - DNA, 1236 bp, Populus balsamifera subsp. trichocarpa
  misc_feature (1)..(1236): Ceres GDNA ANNOT ID no. 1471743
atgatgattcgaatccgcagcagagacgggctggaacgcgtctctatcgacaacccaaacatcacaatttcccaattcaaaactctaatccaaaaccaactccaaatccctatccacaaccaaaccctctccactaaccaaaacctcctcctagccaaatcccctcccgatctcctccaattcaccgacatgtcaaaccctagcacccttctctcttccctcaacatctctcacggctccattattttcttagcctacgaaggccacagaactattgcgggccccgctgttcaccctgctggttctttcggccgtaagatgacaatggacgatctcattgccaaacagatgagagtcggccggcaagaaaatccgcactgcgattcggtgtcgtttgatcgcgattgcgctaatgcgttccagcattatgttaatgaaacgctcgcgtttgctgttaaaagaggtgggtttatgtatggaacggtgtcggaggaggggaaggttgaagtcaatttcatatacgagctgccgcagcaggggactgaagagattttgatgcttttgagggattctgatgaagaaaaaatagtggacgcgattgcggcgggcttggggatgaggagagtggggtttatattcaatcagactataatgcatgacaaaaaagattatactttgtcgaatagggaggttcttcaggcggcggagctgcacgctgagagtgagttgaaggagtgggttactgcggtggtgaagttggaggtgaatgaggacgggggagctgatgtgcacttcgaggcgtttcagatgagtgatatgtgtattaggttgtttaaagaaggatggttcgagacggagattggggaagatgtggatcctaagttgtctataatgaagaaagatgtggttgttggtagcaaggatgttaaggaggttgataatgatttcttcttggtcgttattaagattctcgatcatctgggccctctttcaacaaccttccccattgagaacaggattacccaagtgacaatgagagcattgaggagtcatctggaccgtgcaaagaatcttccatttgtgaagagaatttctgattttcatctcttgctatttctggccaagtttctagacctcaattctgatgttccggcattggcagagtgtgtgcttacacagacagcagtaccagaaggttatcagctcctaattgagtccatggctaatacttcttga

SEQ ID NO: 878 - protein, 410 aa, Populus balsamifera subsp. trichocarpa
  misc_feature (1)..(410): Ceres GDNA ANNOT ID no. 1471743
  misc_feature (1)..(410)
  Functional Homolog of CDNA ID no. 12700063at SEQ ID no. 872with e-value of 3.5E-168 and percent identity of 77.75
MIRIRSRDGLERVSIDNPNITISQFKTLIQNQLQIPIHNQTLSTNQNLLLAKSPPDLLQFTDMSNPSTLLSSLNISHGSIIFLAYEGHRTIAGPAVHPAGSFGRKMTMDDLIAKQMRVGRQENPHCDSVSFDRDCANAFQHYVNETLAFAVKRGGFMYGTVSEEGKVEVNFIYELPQQGTEEILMLLRDSDEEKIVDAIAAGLGMRRVGFIFNQTIMHDKKDYTLSNREVLQAAELHAESELKEWVTAVVKLEVNEDGGADVHFEAFQMSDMCIRLFKEGWFETEIGEDVDPKLSIMKKDVVVGSKDVKEVDNDFFLVVIKILDHLGPLSTTFPIENRITQVTMRALRSHLDRAKNLPFVKRISDFHLLLFLAKFLDLNSDVPALAECVLTQTAVPEGYQLLIESMANTS

SEQ ID NO: 879 - protein, 412 aa, Glycine max
  misc_feature (1)..(412): Ceres CLONE ID no. 1043309
  misc_feature (1)..(412)
  Functional Homolog of CDNA ID no. 12700063at SEQ ID no. 872with e-value of 8.6E-158 and percent identity of 73.11
MLRIRSRDGLERVSVENPLATTVSDLKRIIQTQLGIPVHNQTLSTNQNLLLAKSLEDLLRFTDMSNLDASLSSLNLGHGSIVFLAYEGERRVAGPAFNPAGSFGRKMTMDDLIAKQMRVTRQENPHCELVSFDRDCANAFQHYVNDTLAFAVKRGGFMYGTVSEVGKVEVDFIYEPPQQGSEDNLVFFRDPEEEKFVEAIAVGLGMRKVGFIFTQTITQDKKDYTLSNREVLQAVEYHAESGLKEWATAVVKLEVNEEMGGADVHFEAFQMSDVCVRLFKEGWFETEIKEDDDPKLSKMKKDVVVGVKDTREVDNDFFLVVVKIADHQGPLSSSFPIENRNTQVTMKALKNHLERSKNLPFVKRISDFHLLLVLARVLDLNADVPALTECVQTQTSVPEGYQILIESMASTA

SEQ ID NO: 880 - protein, 413 aa, Glycine max
  misc_feature (1)..(413): Ceres CLONE ID no. 1058118
  misc_feature (1)..(413)
  Functional Homolog of CDNA ID no. 12700063at SEQ ID no. 872with e-value of 7.6E-150 and percent identity of 70.66
MLRIRSRDGLERVSVENPLATTVSDLKRIIQTQLGIPVHNQTLSTNQNLLLAKSLEDLLRFTDMSNLDASLSSLNLGHGSIVFLAYEGERRVAGPAFNPAGSFGRKMTMDDLIAKQMRVTRQENPHCELVSFDRDCANAFQHYVNDTLAFARQARGVHVRHRFRRVGKVEVDFIYEPPQQGSEDNLVFFRDPEEEKFVEAIAVGLGMRKVGFIFTQTITQDKKDYTLSNREVLQAVEYHAESGLKEWATAVVKLEVNEEMGGADVHFEAFQMSDVCVRLFKEGWFETEIKEDDDPKLSKMKKDVVVGVKDTREVDNDFFLVVVKIADHQGPLSSSFPIENRNTQVTMKALKNHLERSKNLPFVKRISDFHLLLVLARVLDLNADVPALTECVQTQTSVPEGYQILIESMASTA

SEQ ID NO: 881 - protein, 309 aa, Zea mays
  misc_feature (1)..(309): Ceres CLONE ID no. 233103
  misc_feature (1)..(309)
  Functional Homolog of CDNA ID no. 12700063at SEQ ID no. 872with e-value of 7.3E-97 and percent identity of 64.36
MTMDDLIARQIRVTRQENALCAAASFDRDAANAFQLYVAEFLGFGVKRAGFLYGRVDAETKDVFVDFIYEPPQQGSEDVVHLLRDPDEEARVDTIAEGLGMRRVGLVFTQAVGRKASETGEYTMSNREVVQAAQLQAEGGIPEWVTAIVKLEVGDDGTGDVHFEAFQMSEICVKLFKDGVLETEVQDADDPRLSKMRKEVVAGGKDTMEVDNDFFLVPVKISDHQGPLSVGFPIENRGNPVSISALRSHLERMKHLAFVKRISDFHLLLKLATFLDVKADMPTIAACVKTQSRVPEGYQLLIESFASQG

SEQ ID NO: 882 - protein, 415 aa, Oryza sativa subsp. japonica
  misc_feature (1)..(415): Public GI no. 34914854
  misc_feature (1)..(415)
  Functional Homolog of CDNA ID no. 12700063at SEQ ID no. 872with e-value of 1.2E-121 and percent identity of 63.21
MILRIRSRDGTDRITVPDPAAATVGDLQRLIAARVTVPVPLQRLSLDPALLLPSSASAALLADPAAPLSSLRLSNGSFVYLSYPPDARSSQPPPPKALSAAGSFGKKMTMDDLIARQIRVTRQEAPLCAAASFDRDSANAFQLHVAESLAFATKRAGFLYGRVDADTKEVFVDFIYEPPQVGTEDVVQLMRDAQEEARVDAIAHGLGMRRVGLVFTQAVGRKTSDTGEYTMSNREVLQATELQAEGGIPEWVTAIVKLEVGDDGSGDVHFEAFQMSEICVKLFKDGVLETEIGDKDDPRLSKMRKEVVAGGKDTMEVDNDFFLVPVKISDHQGPLSTGFPIENRGNPVAMSALKSHLDRAKHLPFVKRISDFHLLLLVAAFLDIKADVPALTACVKNQSVVPEGYQLLIESLAGA

SEQ ID NO: 883 - protein, 415 aa, Triticum aestivum
  misc_feature (1)..(415): Ceres CLONE ID no. 900752
  misc_feature (1)..(415)
  Functional Homolog of CDNA ID no. 12700063at SEQ ID no. 872with e-value of 2.4E-121 and percent identity of 62.87
MILRIRSRDGTDRITVPDAAAATVGDLQRLIEARATVPVAAQRLSLDPALLLPAPQPPLLADPAAPLASLPLANGSFVYLSYPPGARSAQPPPPRALTAAGSFGKKMTMDDLIARQIRVTRQEAPFCSAASFDRDSANAFQLHVSESLAFSVKRAGFLYGRVDAETKEVLVDFIYEPPQQGSSDVVHLMRDADEEARVDAIADGLGMRRVGFVFTQAVGRKASETGEYTLSNSEVVQAAQLQAEGGIPEWVTAVVKLEVGEDGSADVHFEAFQMSEVCVKLFKDGVLETEIQDSDDPRLSKMRKEVIAGGKDTMEVDNDFFLVPVKISDHQGPLSMGFPIENRGIPLPANALRSHMDRAKHLPFVKRISDFHLLLQIAAFLDVKADVPTLAACVGHQAEVPEGYRLLIDALAGQT

SEQ ID NO: 884 - DNA, 827 bp, Arabidopsis thaliana
  misc_feature (1)..(827): Ceres CDNA ID no. 12730465
  misc_feature (1)..(827): Also Known As  Ceres SEEDLINE ME11929
atgtctcacatcgctgttgaaaggaatcgaagaaggcaaatgaacgagcatcttaaatcccttcgttctttgactccttgtttctacatcaaaaggggagatcaagcttcgatcatcggaggagtgatagagttcatcaaagagttgcagcaattggttcaagttcttgagtccaagaaacgtcgaaagaccctaaaccgaccatctttcccttatgatcaccagacaatcgagccatccagtttaggagccgccactacccgagtaccgtttagtcgaatcgaaaatgtgatgaccacaagtactttcaaggaagtaggagcatgctgtaactcccctcatgctaacgtagaagcaaagatttcaggttctaatgttgtattgagagttgtctctaggcgaatcgtggggcagctcgtaaagatcatctctgtcttagagaagctatcttttcaagttcttcacctcaatattagtagcatggaggagactgtcttatactttttcgttgttaagataggattggagtgtcacttaagcttggaggagctaactcttgaagttcagaaaagctttgtgtctgatgaagtgatcgtctctaccaattaaaaacaaaattctacatgtactagagcgtgtatcgttttttgggattaataatcatataatcgttacatgagccttgatactttgctagaaataagctcctctaaacaaaaccttctttttaaaaaaacacacttatgttttacttagtttgttgttgtatccgaagttgatcaacgttgtaatttcccacaataaatcatgacaccccttatatgcgg

SEQ ID NO: 885 - protein, 202 aa, Arabidopsis thaliana
  misc_feature (1)..(202): Ceres CDNA ID no. 12730465
  misc_feature (1)..(202): Also Known As  Ceres SEEDLINE ME11929
  misc_feature (1)..(50): Pfam Name: HLH Pfam Description: Helix-loop-helix DNA-binding domain
  misc_feature: Phenotype: Curled 3 Useful for making plants with altered leaf shape e.g., curled leaves
  misc_feature: Phenotype: Oval Shaped Useful for making plants with increased biomass and foliage
MSHIAVERNRRRQMNEHLKSLRSLTPCFYIKRGDQASIIGGVIEFIKELQQLVQVLESKKRRKTLNRPSFPYDHQTIEPSSLGAATTRVPFSRIENVMTTSTFKEVGACCNSPHANVEAKISGSNVVLRVVSRRIVGQLVKIISVLEKLSFQVLHLNISSMEETVLYFFVVKIGLECHLSLEELTLEVQKSFVSDEVIVSTN

SEQ ID NO: 886 - DNA, 621 bp, Populus balsamifera subsp. trichocarpa
  misc_feature (1)..(621): Ceres GDNA ANNOT ID no. 1459998
atgtctcacatagctgtggaaagaaacagaagaagacagatgaatgagcatctcaaagtcttacgttccttgaccccttgtttctatatcaaaaggggggaccaagcttctataatagggggtgcaatagagttcataaaggagttgcaccaagttctacaagctttggagtccaagaaacaaaggaagagtagtttgagccctagccctggtccttgccttagccctagccctagggcgccactgcaactaataacctctagtcttcatcctgatcaccataacccctttccctttgggaatattgaaaatgatctcaaggaactaggcgctgcatgctgcaactctccaattgcagatgttgaagcaaagatatcaggatcaaacgttatcttgaaagtaatatcgcggcgaataccaggtcaaattgtgaggataatcagtgtgttggaaaacctttcctttgagatccttcacttgaacatcagtagcatggaagatactgtcctttactcctttgtcattaagatagggctagaatgtcaggtgagtgtggaggaactagcagttgaagtgcaacaaagcttctttcaagacacaatttatacatatgagttatag

SEQ ID NO: 887 - protein, 193 aa, Populus balsamifera subsp. trichocarpa
  misc_feature (1)..(193): Ceres GDNA ANNOT ID no. 1459998
  misc_feature (1)..(193)
  Functional Homolog of CDNA ID no. 12730465at SEQ ID no. 885with e-value of 6.9E-53 and percent identity of 69.10
MNEHLKVLRSLTPCFYIKRGDQASIIGGAIEFIKELHQVLQALESKKQRKSSLSPSPGPCLSPSPRAPLQLITSSLHPDHHNPFPFGNIENDLKELGAACCNSPIADVEAKISGSNVILKVISRRIPGQIVRIISVLENLSFEILHLNISSMEDTVLYSFVIKIGLECQVSVEELAVEVQQSFFQDTIYTYEL

SEQ ID NO: 888 - DNA, 603 bp, Populus balsamifera subsp. trichocarpa
  misc_feature (1)..(603): Ceres GDNA ANNOT ID no. 1513263
atgtctcacatagctgtggaaagaaacagaagaagacagatgaatgagcatctcaaagtcttacgttccttgaccccttgtttctatatcaaaaggggggaccaagcttctataatagggggtgcaatagagttcataaaggagttgcaccaagttctacaagctttggagtccaagaaacaaaggaagagtagtttgagccctagccctggtccttgccttagccctagccctagggcgccactgcaactaataacctctagtcttcatcctgatcaccataacccctttccctttgggaatattgaaaatgatctcaaggaactaggcgctgcatgctgcaactctccaattgcagatgttgaagcaaagatatcaggatcaaacgttatcttgaaagtaatatcgcggcgaataccaggtcaaattgtgaggataatcagtgtgttggaaaacctttcctttgagatccttcacttgaacatcagtagcatggaagatactgtcctttactcctttgtcattaaggtgagtgtggaggaactagcagttgaagtgcaacaaagcttctttcaagacacaatttatacatatgagttatag

SEQ ID NO: 889 - protein, 187 aa, Populus balsamifera subsp. trichocarpa
  misc_feature (1)..(187): Ceres GDNA ANNOT ID no. 1513263
  misc_feature (1)..(187)
  Functional Homolog of CDNA ID no. 12730465at SEQ ID no. 885with e-value of 4.1E-48 and percent identity of 68.60
MNEHLKVLRSLTPCFYIKRGDQASIIGGAIEFIKELHQVLQALESKKQRKSSLSPSPGPCLSPSPRAPLQLITSSLHPDHHNPFPFGNIENDLKELGAACCNSPIADVEAKISGSNVILKVISRRIPGQIVRIISVLENLSFEILHLNISSMEDTVLYSFVIKVSVEELAVEVQQSFFQDTIYTYEL

SEQ ID NO: 890 - protein, 178 aa, Glycine max
  misc_feature (1)..(178): Ceres CLONE ID no. 545208
  misc_feature (1)..(178)
  Functional Homolog of CDNA ID no. 12730465at SEQ ID no. 885with e-value of 8.8E-59 and percent identity of 68.59
MNEHLKVLRSLTPCFYIKRGDQASIIGGVIEFIKELHQVLQALESQKRRKSLSPSPGPSPRTLQPMFHQLDSPSMIGTNSFKELGASCNSPVADVEVKISGSYVILKVICHRIPGQVAKIITVLESLSFEVLHLNISSMEETVLYQFVVKIELGCQLSLEELAMEVQQSFCLDAIIAL

SEQ ID NO: 891 - protein, 227 aa, Oryza sativa subsp. japonica
  misc_feature (1)..(227): Public GI no. 50933031
  misc_feature (1)..(227)
  Functional Homolog of CDNA ID no. 12730465at SEQ ID no. 885with e-value of 7.5E-46 and percent identity of 57.50
MSHIAVERNRRRQMNDHLKVLRSLTPAFYIKRGDQASIIGGAIDFIKELQTLLQSLEAQKKRRQQPQAHLISPASISASGGGSPSPTPSPRSLITSCSPTAAAGSSAGSSSSISPKDENKQQLQLVAELAACCNSPMADVEARISGANVLLRTLSRRAPPVRIIALLESLHLEVLHLNITTMDDTVLYSFVLKIGLDCHLSVDDLAMEVHQSFMPPPAAHPDNHLHS

SEQ ID NO: 892 - protein, 206 aa, Zea mays
  misc_feature (1)..(206): Ceres CLONE ID no. 336092
  misc_feature (1)..(206)
  Functional Homolog of CDNA ID no. 12730465at SEQ ID no. 885with e-value of 1.7E-48 and percent identity of 59.09
MNEHLKVLRSLTPGLYIKRGDQASIIGGAIEFIKELQQVLESLEARKKRRSSGGGHSFLTGSPSPTPSPRSHLLSSVSTPSPPVMIKELAACCNSAVADVEAKISGSNVLLRTLSRRSSIPGGQAVRLIAVLEGLHLEVLHLNISTMEDTVLHSLVLKIGLECQLSVEDLAYEVQQIFGQDTAEQKPQAEENHHHLIYSSAMAAAI

SEQ ID NO: 893 - protein, 252 aa, Triticum aestivum
  misc_feature (1)..(252): Ceres CLONE ID no. 771679
  misc_feature (1)..(252)
  Functional Homolog of CDNA ID no. 12730465at SEQ ID no. 885with e-value of 5.5E-21 and percent identity of 49.72
MNEHLTVLRSLMPCFYVKRGDQASIIGGVVDYIKELQQVKQSLEAKKQRKAYTEHVLSPRPPPSSYSPRLPLSPLHKSTPPLSPLLRSTPPLSPRLAVPISPARTPPTPGSPYKLRPLPPPISGSTYVSPAMTPTGYDAASSYLPSLDAIAAELSVYANRQALQLPPTDPLPDVRVEFAGANLVLKTVSHRAPGQAVKIIAALESRAPALEILHAKISTIDDTDVNAFTVKIGIECSLSAEELVQEIQQTFS

SEQ ID NO: 894 - protein, 299 aa, Cucumis melo
  misc_feature (1)..(299): Public GI no. 28558779
  misc_feature (1)..(299)
  Functional Homolog of CDNA ID no. 12730465at SEQ ID no. 885with e-value of 1.1E-26 and percent identity of 40.54
MALEAVVFSQDPLCYNGSKDLYSLLGGGIWANGSFEYPEIPHDFPENQTENFPFEDWNSSSSVFVPNPSPEAADSRNGLLKPPLEAESITPHPIRPRKRRPKSRKNKEEIENQRMTHIAVERNRRKQMNEYLSVLRSLMPESYVQRGDQASIIGGAINFVKELEQQVQVLSTIETKGKINNSAEGCCNSNSNSNSKIPFAEFFSFPQFKAMEGCSLVSENETQCSSTVADIEVTMVENHANLKIRSKRRPKQILKIVAGLHSLSLSVLHLNISTINQIVLYCLSVKVCFSSFFEMGICV

SEQ ID NO: 895 - DNA, 1710 bp, Arabidopsis thaliana
  misc_feature (1)..(1710): Ceres CDNA ID no. 12719314
  misc_feature (1)..(1710): Also Known As  Ceres SEEDLINE ME11942
ggttaataatgagtaggtgtgaacaaatgagagaggaggaggatcagctttgcttttgttcccttttctcgtctctgcagcttccttgttgtcaacttctggaagcctttgattgattgcaacttctatctccattctcctgctcatttaatattccaattaatagtcaatctcgtcgaatcttcaattttttaaagcttttggtcaaatcaaatgtaatgcaaagacagaccaaaacctcctcttcttcttcttatatacttcctctcctacaaaatctctatttacttccatcttctctgctaaagacctttcttcaccattcccaattttccgttcttgtttctgattgaatctagatattgattaagctatggatgtcaatcggaaagctcacccggattgtcgatattcttcaaatcctttccatgaatgtgcttcagattgtttagagaagatctctcaaggccgtggaaataagaattcaaagaagcaaggttcaaagattcttagccttccggggagttttggtaagaaaaagacggagtcacagccaccgtcacccctgagtacaaggaactatcagaatggtgctgctaataccccaaaggttcgtcaatcaagaccttcaccagtagctatgaagaagacgccagttccagaagcgaacaaatctttacactctttatcgtctgatggaatctctattgacctcaacggtcagaatgattcttttaaccataagcaggagaagccatcgcgaactgttcctctatccccaaacagcatggctgatcgtgggaaacccttatcaccacgacctcaagggcatgaacacagtggcaagaatgacacagccagtgagattagtttgtttaatgttgtaagccctccaagatcatgcgccaatgatgatgatgatgatgatgatgaaaacaatggttacgaggagggagtggagttagaccttatatcagtaatgtcagactcatgtgtttcggttggaaaataccgtgtgaactcaagtgtttccacaatcctacagtcaatcattgataaacacggagacatagcagcaaactgcaagctagaatcagcatcaatgcgatcccgatacctagagtgtctatgctcattgatgcaagaacttggatcaaccccggtgggtcagttaaccgaactaaaagtaaaagagatggtcgcggttctcaaggacttggagtctgtgaacatcgacgttggctggatgcgttcggttcttgaggagtttgctcagtatcaagagaacacagactcagagaaggagagacaagaaggattggtgaggtctaagaaacaagaaatggagattcaagaagctgatttggctcggattgagaaggaagtagcggaggcgaggttgagggtcgaggagatgaaagcagagctcgctgagctcgagacagagcggttgcggatggaggagatgggatttaaggtcgagaaatataaagggaagacgtttcttgatgaacttctgtgatggttgttaatatagagtaaacacaatactccagaagattaatactaatgtttagtttatgtttgatatataagatgttctttaatagtcaaaacctgatctgagtcattaaggtgaagattcaccaaagagtattattttcttgtttaattcttttggtgataataaattgtttcttctttttattt

SEQ ID NO: 896 - protein, 382 aa, Arabidopsis thaliana
  misc_feature (1)..(382): Ceres CDNA ID no. 12719314
  misc_feature (1)..(382): Also Known As  Ceres SEEDLINE ME11942
  misc_feature (160)..(380): Pfam Name: PEARLI-4 Pfam Description: Arabidopsis phospholipase-like protein (PEARLI 4)
  misc_feature: Phenotype: Reduced fertility Useful for sterility, genetic confinement systems
MDVNRKAHPDCRYSSNPFHECASDCLEKISQGRGNKNSKKQGSKILSLPGSFGKKKTESQPPSPLSTRNYQNGAANTPKVRQSRPSPVAMKKTPVPEANKSLHSLSSDGISIDLNGQNDSFNHKQEKPSRTVPLSPNSMADRGKPLSPRPQGHEHSGKNDTASEISLFNVVSPPRSCANDDDDDDDENNGYEEGVELDLISVMSDSCVSVGKYRVNSSVSTILQSIIDKHGDIAANCKLESASMRSRYLECLCSLMQELGSTPVGQLTELKVKEMVAVLKDLESVNIDVGWMRSVLEEFAQYQENTDSEKERQEGLVRSKKQEMEIQEADLARIEKEVAEARLRVEEMKAELAELETERLRMEEMGFKVEKYKGKTFLDELL

SEQ ID NO: 897 - DNA, 1670 bp, Arabidopsis thaliana
  misc_feature (1)..(1670): Ceres CDNA ID no. 12559673
  misc_feature (1)..(1670): Also Known As  Ceres SEEDLINE ME12013
ctccttcgtgttcgagatttgatatcgactaatcgaatcagaggataagagaatggctcacagaatactgagagatcatgaagccgatggatgggaacgctccgatttcccaatcatctgcgaatcttgtctcggtgacaacccctacgtgcgaatgaccaaagcgaattatgataaggaatgcaagatatgtacacgacctttcacggtgtttaggtggcgacctggccgggatgctagatacaagaaaaccgaaatttgtcagacttgctgcaagttgaaaaatgtttgtcaagtctgtcttctggatcttgagtatggtcttccagttcaagtaagagacacagcactcaacattagtactcatgactctatccctaaaagtgatgtcaacagagagtattttgctgaagagcatgacaggaaggctagagctggactggattatgaatcttcattcgggaagatgcgacccaatgatactattttaaagcttcaaagaacaacaccgtactataagaggaaccgagcacatgtttgtagtttcttcatcaggggtgagtgtacaagaggtgctgaatgtccataccggcatgagatgcccgaaacaggagagctatcccagcaaaacataaaagaccgttattatggtgttaatgatccagttgctatgaagttgcttggcaaagctggtgagatgggcactttggaatcgccagacgatgaaagcatcaaaaccctttacgtcggtggacttaactcgagaattctcgagcaggacatacgagaccaattctacgctcatggagaaattgaatctatcagaatcttggccgataaagcctgtgcatttgtcacatacacaagccgtgaaggtgcagagaaggctgcgcaagagctctccaacaggctagtcatcaacggtcagaggctaaaactcacatggggaagacccaaacctgatcaagatggtgcaaaccaacagggcggtgtggctcatagtgggttactacctcgagccgttatatctcagcagcacaatcaacccccaccaatgcagcagtactatatgcacccaccaccagctaaccaagacaaaccttattacccatcaatggacccacagagaatgggtgcagtcatttcaacccaagaggctggtggttcaagcactgagaacaacggagcttcatcttcttcttacatgatgcctccacaccagtcatacccaccaccaccatatggatatatgccatcgccttaccagcagcagtatcctcctaaccatcatcatcaacctagtcctatgcagcactatgccccgcctccagcagcttacccgtacccacagcaacctggtcctggatcaagacctgcaccgtctccaaccgcggtctctgctatatcacccgactctgcacctgctgggtctggagcaccttcgggatcctctcaacaagctcctgatgtttctacagctactggttcgtctcagtagagaagaaatatcgcttaaaaaatgtactgcaagtttcccgctattcaggacgaaggttttttgtattctgaatgaatcattttcttctgctttttaaagtacttcggaatgtattgtttcttcaaaacggttgttaacgaaatctatcagttatagaggcaattggttccat

SEQ ID NO: 898 - protein, 481 aa, Arabidopsis thaliana
  misc_feature (1)..(481): Ceres CDNA ID no. 12559673
  misc_feature (1)..(481): Also Known As  Ceres SEEDLINE ME12013
  misc_feature (158)..(183): Pfam Name: zf-CCCH Pfam Description: Zinc finger C-x8-C-x5-C-x3-H type (and similar)
  misc_feature (230)..(296): Pfam Name: RRM_1 Pfam Description: RNA recognition motif (a.k.a. RRM, RBD, or RNP domain)
  misc_feature: Phenotype: INFLORESCENCE Useful for making ornamental plants with modified flowers
  misc_feature: Phenotype: Short Useful for making shorter plants
MAHRILRDHEADGWERSDFPIICESCLGDNPYVRMTKANYDKECKICTRPFTVFRWRPGRDARYKKTEICQTCCKLKNVCQVCLLDLEYGLPVQVRDTALNISTHDSIPKSDVNREYFAEEHDRKARAGLDYESSFGKMRPNDTILKLQRTTPYYKRNRAHVCSFFIRGECTRGAECPYRHEMPETGELSQQNIKDRYYGVNDPVAMKLLGKAGEMGTLESPDDESIKTLYVGGLNSRILEQDIRDQFYAHGEIESIRILADKACAFVTYTSREGAEKAAQELSNRLVINGQRLKLTWGRPKPDQDGANQQGGVAHSGLLPRAVISQQHNQPPPMQQYYMHPPPANQDKPYYPSMDPQRMGAVISTQEAGGSSTENNGASSSSYMMPPHQSYPPPPYGYMPSPYQQQYPPNHHHQPSPMQHYAPPPAAYPYPQQPGPGSRPAPSPTAVSAISPDSAPAGSGAPSGSSQQAPDVSTATGSSQ

SEQ ID NO: 899 - protein, 482 aa, Oryza sativa subsp. japonica
  misc_feature (1)..(482): Public GI no. 50949165
  misc_feature (1)..(482)
  Functional Homolog of CDNA ID no. 12559673at SEQ ID no. 898with e-value of 2.5E-174 and percent identity of 74.89
MAHRLLRDAQADGWERSDFPIICESCLGDNPYVRMLRAEYDKECKICARPFTVFRWRPGRDARYKKTEICQTCCKLKNVCQVCLLDLEYGLPVQVRDTALAINSNDAIPRSDVNREYFAEEHDRKARAGIDYDSSHGKARPNDTILKLQRTAPYYKRNRAHVCSFYVRGECTRGAECPYRHEMPETGELSQQNIKDRYYGVNDPVALKLLGKAGEMPSLTPPDDESIRTLYIGGLNNRITEQDLRDQFYAHGEIESIRMVLQRACAFVTYTTREGAEKAAEELANKLVIKGIRLKLMWGKPQAPKPEDDEAGRQGHVAHGGMLPRAVISQQQSGDQPQPPGMEGQQQAPSGSYYFNIPAPPGAERTLYPSMDPQRMGALVKSQEGDGKPGPQQAAQAQASSSSGQSYPMPPQYYHGQYPPYYPPYGGYMPPPRMPYPPPPQYPPYQPMLATPAQSQASSSQQPAPATLHQAQVPPPQQTTQN

SEQ ID NO: 900 - protein, 486 aa, Oryza sativa subsp. japonica
  misc_feature (1)..(486): Public GI no. 50935893
  misc_feature (1)..(486)
  Functional Homolog of CDNA ID no. 12559673at SEQ ID no. 898with e-value of 7.9E-171 and percent identity of 71.90
MAHRLLRDAQADGWERSDFPIICESCLGDNPYVRMLRAEYDKECKICARPFTVFRWRPGRDARYKKTEICQTCCKLKNVCQVCLLDLEYGLPVQVRDTALSTNSNDAIPRSDVNREYFAEEHDRRARAGIDYDSSNGKARANDTILKLQRTAPYYKRNRAHVCSFYVRGECTRGAECPYRHEMPETGELSQQNIKDRYYGVNDPVALKLLSKAGEMPSLTPPDDESIRTLYIGGLDSRVTEQDLRDQFYAHGEIETIRMVLQRACAFVTYTTREGAEKAAEELANKLVIKGVRLKLMWGKPQAPKPEEDEAGRQGHVAHGGMLPRAVISQQQSGDQPQPPGMEGQQQPASASYYFNIPAPPAAERTLYPSMDPQRMGALVESQEGDGKPGPQQAGQGQASSSSGQSYPEPPPPYYHGGQYPPYYPPYGGYMPPPRMPYQQPPQYPAYQPMLAPPAQSQASSLQQPAPATQQLGQGPQQQTTQNGMT

SEQ ID NO: 901 - protein, 493 aa, Zea mays
  misc_feature (1)..(493): Ceres CLONE ID no. 364564
  misc_feature (1)..(493)
  Functional Homolog of CDNA ID no. 12559673at SEQ ID no. 898with e-value of 3.8E-171 and percent identity of 71.30
MAHRLLRDAQADGWERSDFPIICESCLGDNPYVRMLRAEYDKECKICARPFTVFRWRPGRDARYKKTEICQTCCKLKNVCQVCLLDLEYGLPVQVRDTALSINSNDAIPRSDVNREYFAEEHDRRARAGIDYDSSYGKARPNDTILKLQRTAPYYKRNRAHVCSFFVRGECTRGAECPYRHEMPETGELSQQNIKDRYYGVNDPVALKLLSKAGEMPSLTPPDDETIRTLYIGGLDSRITEQDLRDQFYAHGEIESIRMVLQRAIAFVTYTTREGAEKAAEELANKLVIKGVRLKLMWGKPQAPKPEEDESGRLGQVSHGGLLPRAVISQQQSGDQPQPPGMEGQQQQAAPASYYFNIPAPPAAERTVYPSMDPQRMGAIVKPHDSEGKPGPQQAGQGQASSNPAQGGGYPAPPPYYHGQYPPYYPPPPPYGGYMPPPRMPYPPQYPPYQPMLAQPAQAQASSSRQPPHAGGGQQQPPDGPPAQQQPQQPIQN

SEQ ID NO: 902 - DNA, 1596 bp, Populus balsamifera subsp. trichocarpa
  misc_feature (1)..(1596): Ceres GDNA ANNOT ID no. 1514988
atggcgcacaggttgttaaaagacccggaggctgacggatgggaacggtctgactttcctatcatttgcgagtcttgcttaggtgacaatccctatgtcagaatgaccagagctgacttcgataaggaatgcaagatatgtactcgaccatttacagtgtttaggtggaggcctggcagggatgcgagatttaaaaagactgaagtttgccagacttgcagtaagttgaaaaatgtttgtcaagtctgtcttttggatctagagtatggtttgcctgttcaagttcgtgatactgctctcagtataaattccaacgatgctattccaaagagtgatgtgaatagagagtattttgccgaggagcatgaccgaagggctagggcgggaattgattatgaatcttcatatggaaaggcacaagcaaatgatactattctgaagcttcaaagaacaacaccatactacaaaagaaatcgagcacatgtttgtagcttctttgcacgtggtgaatgcacacgaggtgccgagtgcccctataggcatgagatgcccataactggggagttgtcacaacaaaatattaaagatcgttactatggagtgaatgatcctgtggcaatgaagctactcaacaaggctggagacatgccgtcattagaaccaccagaggatgaaagcattaaaacgctctatgtaggtgggcttgatgcgaggatcaatgagcaggacctaagggatcagttttatgctcatggcgaaattgaatccataaaaatggtgcctcaaagagcaattgcttttgtaacctacacaaccagagaaggagcagaaaaggccgcagcggagctctctaacaggctagtcatcaagggtctgcgtctgaaattgatgtggggtagaccgcaagcaccaaaacctgagtcggaaagttctgatgaagcaaggcagcaggcagcaatggcccatagtgggatgttgccccgtgcagttgtatctcagcaacacaaccacttaaatccaccaggcacccaggaccaacatcctccaatgcactacttcaatattcccccaccacctcagcaagaacgagcattttacccgtcaatggatcctcaaagaatgggtgcccttgttggatcccaagacggtactcctaatgggcctgcaggatcaggtgagaataaatctggattggagaagcagctcgggcagcactatccatatcaaagtatgccaccacctcacgtgcaataccaacaacaataccaacaacaacattatccagcatatggttatatgccgccagtgccaccgtatcagcagtatcctctgccatatcacactcctgtgcctcccccacaggtggtgcaatccacacagcagtatcagcatcgtgtgccaccgccaatgtctgcacctgcagagtccatgacctcattgcccccacctcagggatcccgagcacctgcagggtccatgccctctggacccccacctcagggatctgaagcacctgctgggtctaaaccctccggcccaccatctcctagacctggagaacctgaagaatctaaaccctcagggcccccaccttaa

SEQ ID NO: 903 - protein, 497 aa, Populus balsamifera subsp. trichocarpa
  misc_feature (1)..(497): Ceres GDNA ANNOT ID no. 1514988
  misc_feature (1)..(497)
  Functional Homolog of CDNA ID no. 12559673at SEQ ID no. 898with e-value of 3.8E-155 and percent identity of 70.14
MTRADFDKECKICTRPFTVFRWRPGRDARFKKTEVCQTCSKLKNVCQVCLLDLEYGLPVQVRDTALSINSNDAIPKSDVNREYFAEEHDRRARAGIDYESSYGKAQANDTILKLQRTTPYYKRNRAHVCSFFARGECTRGAECPYRHEMPITGELSQQNIKDRYYGVNDPVAMKLLNKAGDMPSLEPPEDESIKTLYVGGLDARINEQDLRDQFYAHGEIESIKMVPQRAIAFVTYTTREGAEKAAAELSNRLVIKGLRLKLMWGRPQAPKPESESSDEARQQAAMAHSGMLPRAVVSQQHNHLNPPGTQDQHPPMHYFNIPPPPQQERAFYPSMDPQRMGALVGSQDGTPNGPAGSGENKSGLEKQLGQHYPYQSMPPPHVQYQQQYQQQHYPAYGYMPPVPPYQQYPLPYHTPVPPPQVVQSTQQYQHRVPPPMSAPAESMTSLPPPQGSRAPAGSMPSGPPPQGSEAPAGSKPSGPPSPRPGEPEESKPSGPPP

SEQ ID NO: 904 - DNA, 1641 bp, Populus balsamifera subsp. trichocarpa
  misc_feature (1)..(1641): Ceres GDNA ANNOT ID no. 1461702
atggcgcacaggttgttaaaagacccggaggctgacggatgggaacggtctgactttcctatcatttgcgagtcttgcttaggtgacaatccctatgtcagaatgaccagagctgacttcgataaggaatgcaagatatgtactcgaccatttacagtgtttaggtggaggcctggcagggatgcgagatttaaaaagactgaagtttgccagacttgcaagtatggtttgcctgttcaagttcgtgatactgctctcagtataaattccaacgatgctattccaaagagtgatgtgaatagagagtattttgccgaggagcatgaccgaaggctatttactgtgttgtgtgttagaattctcgggttgttagggtatcaccattactgggtaaccgatgatttccaaatacttaacaatgctagggcgggaattgattatgaatcttcatatggaaaggcacaagcaaatgatactattctgaagcttcaaagaacaacaccatactacaaaagaaatcgagcacatgtttgtagcttctttgcacgtggtgaatgcacacgaggtgccgagtgcccctataggcatgagatgcccataactggggagttgtcacaacaaaatattaaagatcgttactatggagtgaatgatcctgtggcaatgaagctactcaacaaggctggagacatgccgtcattagaaccaccagaggatgaaagcattaaaacgctctatgtaggtgggcttgatgcgaggatcaatgagcaggacctaagggatcagttttatgctcatggcgaaattgaatccataaaaatggtgcctcaaagagcaattgcttttgtaacctacacaaccagagaaggagcagaaaaggccgcagcggagctctctaacaggctagtcatcaagggtctgcgtctgaaattgatgtggggtagaccgcaagcaccaaaacctgagtcggaaagttctgatgaagcaaggcagcaggcagcaatggcccatagtgggatgttgccccgtgcagttgtatctcagcaacacaaccacttaaatccaccaggcacccaggaccaacatcctccaatgcactacttcaatattcccccaccacctcagcaagaacgagcattttacccgtcaatggatcctcaaagaatgggtgcccttgttggatcccaagacggtactcctaatgggcctgcaggatcaggtgagaataaatctggattggagaagcagctcgggcagcactatccatatcaaagtatgccaccacctcacgtgcaataccaacaacaataccaacaacaacattatccagcatatggttatatgccgccagtgccaccgtatcagcagtatcctctgccatatcacactcctgtgcctcccccacaggtggtgcaatccacacagcagtatcagcatcgtgtgccaccgccaatgtctgcacctgcagagtccatgacctcattgcccccacctcagggatcccgagcacctgcagggtccatgccctctggacccccacctcagggatctgaagcacctgctgggtctaaaccctccggcccaccatctcctagacctggagaacctgaagaatctaaaccctcagggcccccaccttaa

SEQ ID NO: 905 - protein, 512 aa, Populus balsamifera subsp. trichocarpa
  misc_feature (1)..(512): Ceres GDNA ANNOT ID no. 1461702
  misc_feature (1)..(512)
  Functional Homolog of CDNA ID no. 12559673at SEQ ID no. 898with e-value of 6.4E-137 and percent identity of 69.16
MTRADFDKECKICTRPFTVFRWRPGRDARFKKTEVCQTCKYGLPVQVRDTALSINSNDAIPKSDVNREYFAEEHDRRLFTVLCVRILGLLGYHHYWVTDDFQILNNARAGIDYESSYGKAQANDTILKLQRTTPYYKRNRAHVCSFFARGECTRGAECPYRHEMPITGELSQQNIKDRYYGVNDPVAMKLLNKAGDMPSLEPPEDESIKTLYVGGLDARINEQDLRDQFYAHGEIESIKMVPQRAIAFVTYTTREGAEKAAAELSNRLVIKGLRLKLMWGRPQAPKPESESSDEARQQAAMAHSGMLPRAVVSQQHNHLNPPGTQDQHPPMHYFNIPPPPQQERAFYPSMDPQRMGALVGSQDGTPNGPAGSGENKSGLEKQLGQHYPYQSMPPPHVQYQQQYQQQHYPAYGYMPPVPPYQQYPLPYHTPVPPPQVVQSTQQYQHRVPPPMSAPAESMTSLPPPQGSRAPAGSMPSGPPPQGSEAPAGSKPSGPPSPRPGEPEESKPSGPPP

SEQ ID NO: 906 - DNA, 1147 bp, Arabidopsis thaliana
  misc_feature (1)..(1147): Ceres CDNA ID no. 12663374
  misc_feature (1)..(1147): Also Known As  Ceres SEEDLINE ME12040
agaaaccaaatttccggtagaaaaatcaaaatgcttcagctcgtggttgtagcgtggctcttgattttcacggcggagacggttgtacctcaccaggaatccggcgaatggagttgtgaatcggactcggagattcaggtcttagccgatttcagaccggggattatcaccctcgatggtcacaacgatgactggaaggacattgacggctccgagttcccgctccgacctgcacttgatccggactccgatcacgagtatgacgccgggaagatgacagtcaaggcactacatgatggtcgagatatctactttcttctggagattgatggaaattacgcttatgataaaggtgaaaacaacaagtgtccttcagtggctctcatgttccaaattggtgatcaagctacttatcacaatatgggtggttgtaaagaagggacagactcatgtaccagcaaggcttgcagaggcttcgaggttgatattatgcatttctccattggaaatgctattccaggacggctttacggtggtaatccaatagacaacggggaaggaaatggaggtgacagatttggtcatctggttgacatttatgcatggaatccacattgtcggtaccttgatggtcttggaccctcaggaaatgattccagtgcacagaacgattggcatggagcgtggtggcacagcagcttcaccactctatcaggttatgtagaggaagacagcccttacacgccagatggcaagaaaggaacttactattttgagttttcaaggcccttgaggacaatggaccgtctccaacaggatgttcagttcacgcttggctcgccggccaaaatgtccgtcgcattctggtacccagtggacagcaaaccatggcatggatcaggacactacacgatcaactgcgattggacaccgctagatatctcctcggggtcttcttcgggtctcacggcttcaactgtcaagggctctagcgatggggccagcattacagccattttgttgtccatgatatctcttgtgttttcgggttttattgcatataggctatttagtcccaggaacgttccattcacacccatggaaaacaatctgtaggagaaatatggttattagtccctttggtctc

SEQ ID NO: 907 - protein, 361 aa, Arabidopsis thaliana
  misc_feature (1)..(361): Ceres CDNA ID no. 12663374
  misc_feature (1)..(361): Also Known As  Ceres SEEDLINE ME12040
  misc_feature: Phenotype: Short Useful for making shorter plants
  misc_feature: Phenotype: Reduced fertility Useful for sterility, genetic confinement systems
MLQLVVVAWLLIFTAETVVPHQESGEWSCESDSEIQVLADFRPGIITLDGHNDDWKDIDGSEFPLRPALDPDSDHEYDAGKMTVKALHDGRDIYFLLEIDGNYAYDKGENNKCPSVALMFQIGDQATYHNMGGCKEGTDSCTSKACRGFEVDIMHFSIGNAIPGRLYGGNPIDNGEGNGGDRFGHLVDIYAWNPHCRYLDGLGPSGNDSSAQNDWHGAWWHSSFTTLSGYVEEDSPYTPDGKKGTYYFEFSRPLRTMDRLQQDVQFTLGSPAKMSVAFWYPVDSKPWHGSGHYTINCDWTPLDISSGSSSGLTASTVKGSSDGASITAILLSMISLVFSGFIAYRLFSPRNVPFTPMENNL

SEQ ID NO: 908 - protein, 365 aa, Glycine max
  misc_feature (1)..(365): Ceres CLONE ID no. 464433
  misc_feature (1)..(365)
  Functional Homolog of CDNA ID no. 12663374at SEQ ID no. 907with e-value of 1.6E-142 and percent identity of 68.80
MLRYLLVFFLLGLGTRVESHEESGHWSCESESEIRVETEFKPGVITLDGHADDWKDIDGSYFPLLPALDPDAENEFKGGKMSVKSVHDGRDIFFLLQVDGDYAYSKGESNKCPSVALMFQIGDSASYHDMGGCKEHSTSCTDKTCKGHEVDIMHFSIGSAIPGRLYGGNPLDNRDGNGGDRFGHLVDLYAWNPHCRYLDGIGPPGSANDSSAQNDWKGAWWHSSFTVHSGFVEDESPYADNGKKGTYFFEFSRSLRTMDHLQQDVQFNIGGSSKMSVAFWYPVDGQPWHGSGHYSVYCDWVPIDISVGKSLNGKSVDAASNSSWNVASAFSVILSVAALCVSVFVSYRVFSPKSVSFTPIENNNL

SEQ ID NO: 909 - DNA, 730 bp, Brassica napus
  misc_feature (1)..(730): Ceres CDNA ID no. 23419575
  misc_feature (1)..(730): Also Known As  Ceres SEEDLINE ME12063
ataaatttcgatcgatgtctacgttcttaacacaattcacaatcttctttagaatccaaaatcattgttcgaagaagaaaaaaccgaagatggcaacaacatccacgggagatatcgagaaaacgaagtcagtagaagtgaagaagaaacttaacgtgttgatcgtcgatgatgatcctgtaattcgtaaacttcacgagattatcatcaaatcaatcggtggaatttcacagacagctaagaacggtgaggaggcagtgaacatccaccgcgacggcaatgcatctttcgaccttatcctaatggataaagaaatgcccgagagggatggactttcggcaactaagaagctaagagaaatgaaagtgacgtctatgattattggggtgacgacactggctgacaatgaagaggaacgtaaggctttcatggaagctggacttaaccattgcttggcaaagcccttaagcaaagccaagatcctccctctcatcaacaatctcatggatgcttgatggatggatgaattgtcgccactacatatctacattatataaatatgaaaaacacataataacgtcagcttatacacctgtgtgtgtatgcatatatctatctgcatgtgtgtgttttagggttgttatgtttgatttttatcgtgcgtggcgtgatatacaatcatgtaagtcattacttttggcttataaaataatgaataagatttyttatg

SEQ ID NO: 910 - protein, 141 aa, Brassica napus
  misc_feature (1)..(141): Ceres CDNA ID no. 23419575
  misc_feature (1)..(141): Also Known As  Ceres SEEDLINE ME12063
  misc_feature (21)..(142): Pfam Name: Response_reg Pfam Description: Response regulator receiver domain
  misc_feature: Phenotype: Late Flowering Useful for delaying flowering time
  misc_feature: Phenotype: Dark Green Useful for increasing chlorophyll and photosynthetic capacity
  misc_feature: Phenotype: Short Petioles Useful for making smaller plants
MATTSTGDIEKTKSVEVKKKLNVLIVDDDPVIRKLHEIIIKSIGGISQTAKNGEEAVNIHRDGNASFDLILMDKEMPERDGLSATKKLREMKVTSMIIGVTTLADNEEERKAFMEAGLNHCLAKPLSKAKILPLINNLMDA

SEQ ID NO: 911 - protein, 136 aa, Brassica napus
  misc_feature (1)..(136): Ceres CLONE ID no. 1081216
  misc_feature (1)..(136)
  Functional Homolog of CDNA ID no. 23419575at SEQ ID no. 910with e-value of 8.5E-52 and percent identity of 81.62
MATKSMGDIEKIKKKLNVLIVDDDPLNLIIHEKIIKAIGGISQTANNGEEAVIIHRDGGSSFDLILMDKEMPERDGVSTTKKLREMEVKSMIVGVTSLADNEEERRAFMEAGLNHCLAKPLTKDKIIPLINQLMDA

SEQ ID NO: 912 - DNA, 747 bp, Populus balsamifera subsp. trichocarpa
  misc_feature (1)..(747): Ceres GDNA ANNOT ID no. 1448041
atggctgacgaagataacactcaaagtgatcaagaaatgcaggatctttcatcaatagctgacgaagataacactcaaactggtcaagaaattcagagtcttgttatgaaactggatgagcactatgcaaacttagaacaaaagaggcaggtttttgagaattcaattgggtcagaaatcgaagtcctcaacaaagatcaaaatgaagccaggaaactaaggcacagtcttctttatggatctgatgatataagcagcaatcttgaagctgcaagccagaacatcgctaatgtgaagcaatggctgaatgagaacacactggacagcgaggacgaagaagatcagggcaataatttctctgtgcttattgttgatgacgatcgtactattcgagaaaccaatcggagattcatggcgttagccgggacacaaaagcagctaagaatggaatttcaagaggcaaagaatgggaaagaagctgtatatcttcatcttgctggggcttcttttgatctcattcttatggacaatcaaatgcccatcatgactggaattcaggcaacacagctgttacgcaagatgggtgttaagagtcggattgtaggtgtgacttctgagcccgaccgacaagctttcatcgatgctggcctcaacaactgcattcaaaagccactgaaccctggaaagatcactgaattcctcactgtttccaaaaagcgaagaaggaccgatatatcacaagcttga

SEQ ID NO: 913 - protein, 236 aa, Populus balsamifera subsp. trichocarpa
  misc_feature (1)..(236): Ceres GDNA ANNOT ID no. 1448041
  misc_feature (1)..(236)
  Functional Homolog of CDNA ID no. 23419575at SEQ ID no. 910with e-value of 9.2E-19 and percent identity of 54.29
MQDLSSIADEDNTQTGQEIQSLVMKLDEHYANLEQKRQVFENSIGSEIEVLNKDQNEARKLRHSLLYGSDDISSNLEAASQNIANVKQWLNENTLDSEDEEDQGNNFSVLIVDDDRTIRETNRRFMALAGTQKQLRMEFQEAKNGKEAVYLHLAGASFDLILMDNQMPIMTGIQATQLLRKMGVKSRIVGVTSEPDRQAFIDAGLNNCIQKPLNPGKITEFLTVSKKRRRTDISQA

SEQ ID NO: 914 - DNA, 993 bp, Populus balsamifera subsp. trichocarpa
  misc_feature (1)..(993): Ceres GDNA ANNOT ID no. 1438056
atgacaagtcgagtttcagacgaggaagatagcactcaaatcgaacaaaccattgattcatcaatggttgtcgaaccaataacaccaccaacggagcctatgatcacaagtcaagtttcagatgaggaagatagcactcaaactgaacaagaaattcaggctttgttttctctactggatacttgcatcacaaatttggaaggaaagttgaccgatgccaagtcatccaaggcaaaaattgaagcacttcttgaaaaagtaattcaattgctgattgatgaactcaagatcaaagcagaagatagtgaggataaatggttcataaagagggatggaatggtggctccgtcctatcttacaagaaacaatactgatcttcagcaaattcagcttctagttagaaaactggatcgctacatggcaaaggtggatcaagagttgcatgtattagagaatatacccttcctgagggaagaaatcgatagagatcgagaagaagccacgactttgaaacttactcttgaaatttgtgatacaaggaacgatcttgaagtgggatcgttggttacttatgcgaaccaatggctgaatgatcagaagacacagagtgttgaaagtgtagacacaaagggcaacaatttctcggtacttgttgtccatgacagtcgtgatcttcgagaaacccgccagaggctcttggtgttgcttgggtatcaaaagaagcttcaaatggatgtttcagtggccaaaaatggaaaagaagctgtttatcttcatcttgctggggcttcctttgatatgattattatggatgacctgatgcccttcatggatggaattgaggcaataaatctgttacgcaggatgggtgttgaaagccgcattgtcggtgttactggtgagtttaagcgactagctttcatggactcaggcgccgacagctgcattataaagccactgactcttgaaaagctcgctgctgtcttccggtga

SEQ ID NO: 915 - protein, 309 aa, Populus balsamifera subsp. trichocarpa
  misc_feature (1)..(309): Ceres GDNA ANNOT ID no. 1438056
  misc_feature (1)..(309)
  Functional Homolog of CDNA ID no. 23419575at SEQ ID no. 910with e-value of 1.2E-14 and percent identity of 47.01
MVVEPITPPTEPMITSQVSDEEDSTQTEQEIQALFSLLDTCITNLEGKLTDAKSSKAKIEALLEKVIQLLIDELKIKAEDSEDKWFIKRDGMVAPSYLTRNNTDLQQIQLLVRKLDRYMAKVDQELHVLENIPFLREEIDRDREEATTLKLTLEICDTRNDLEVGSLVTYANQWLNDQKTQSVESVDTKGNNFSVLVVHDSRDLRETRQRLLVLLGYQKKLQMDVSVAKNGKEAVYLHLAGASFDMIIMDDLMPFMDGIEAINLLRRMGVESRIVGVTGEFKRLAFMDSGADSCIIKPLTLEKLAAVFR

SEQ ID NO: 916 - DNA, 978 bp, Populus balsamifera subsp. trichocarpa
  misc_feature (1)..(978): Ceres GDNA ANNOT ID no. 1438055
atgacaagtcaagataacactcaaattaatcttgaaatcaagactttactcgtgcaactgaacggcagggtcacaaatttagaaaaaaagatcacttctgccgagtccttcaaggcagaaattgaagctttagtgaatgaagcaaggaaatctcatcattctagcactgcaagaagaaaccatcttgataaggcaaggcaattgctgatgcaaaagattgatgaattcaagaaagaagaagataccgaggatagaggactcacaaagactgatgcaatgggggctccttccgatcttacaggaaaccgtgtgtcaatggttcagaaagatcacaagcaaactcagattctagctacagaagtggatcggtacattgcagagattgatcggaaggtgaatgtattagaggatccatcctacctgacggaagaaatcagagccctgaatgtagatcgagtgaaagccgagtctttaaaactttttcttcaatctagtgatagaaagaaggatcttgaagtaagacgaaggattgcttacgtgaatcaatggctgaatcataagacggagagccataaaagtggagactcaagcatcaaatactgtgtgcttgttgtcgatgataactgtgaagatcgagaaagccttcgcgaactcctcatgtcgtttaagtcacaaacgacgcctacaatggatgttcaagtggcaaaaaatggaaaagaagctgtttatcttcatcttgctggggcttcctttgatatgattgttatggacgatttaatgcccgtcatgaatggaattgaggcaacgaagcagctattcggcatgggtgttatcagcttcattgttggtgtcggtgatgacaccgtgaaacaagcatttattgatgcgggcatagaccaatacatagaaaagcctctgactcctgcgaaggtcgctgatctcttccctgatctcagcgactcatacttcgacctttaa

SEQ ID NO: 917 - protein, 256 aa, Populus balsamifera subsp. trichocarpa
  misc_feature (1)..(256): Ceres GDNA ANNOT ID no. 1438055
  misc_feature (1)..(256)
  Functional Homolog of CDNA ID no. 23419575at SEQ ID no. 910with e-value of 6E-15 and percent identity of 42.52
MQKIDEFKKEEDTEDRGLTKTDAMGAPSDLTGNRVSMVQKDHKQTQILATEVDRYIAEIDRKVNVLEDPSYLTEEIRALNVDRVKAESLKLFLQSSDRKKDLEVRRRIAYVNQWLNHKTESHKSGDSSIKYCVLVVDDNCEDRESLRELLMSFKSQTTPTMDVQVAKNGKEAVYLHLAGASFDMIVMDDLMPVMNGIEATKQLFGMGVISFIVGVGDDTVKQAFIDAGIDQYIEKPLTPAKVADLFPDLSDSYFDL

SEQ ID NO: 918 - protein, 127 aa, Oryza sativa subsp. japonica
  misc_feature (1)..(127): Public GI no. 50918565
  misc_feature (1)..(127)
  Functional Homolog of CDNA ID no. 23419575at SEQ ID no. 910with e-value of 2.4E-15 and percent identity of 37.60
MARKMIRVLLVEDEEINRVVARAALKAAGGGDVVDEAENGEVAVQRVRDAAAPYDLVLMDKQMPVMDGHEATRRIRGMGVTTPIVAVSSDGLPADVDAFITAGADDFTSKPLSKEKLGVILAKFRLA

SEQ ID NO: 919 - DNA, 1543 bp, Zea mays
  misc_feature (1)..(1543): Ceres CDNA ID no. 23778739
  misc_feature (1)..(1543): Also Known As  Ceres SEEDLINE ME12103
cccgttcaacccacctttctgccacacacctcgagcgaagcaagcaccgcaagaattgaagagccagggagattttccgtcgctccgtccgatccatggccgaacagtggtggggcagtgcctctcacaggagtcacggcacgtcggcgtgctcggccgccgcgccaccgccgctcacggtcacgggcagggtggcctgcggcagcaccttccccaccgcagccgttgagtcgacgagctccgtaaccttccaggacccttatagaagctccacccatcagcctttgtctgatgccgcctcctcgctcggtgatccacacctggactggacgcaaaccttcttgagcgggaggagcgatgccagcttccaagccgtgctccaagaaccctccgcgacgaacgatccattaatcagggaccacatggacatgggtgccggcttcttggccgaccaggcgcagctagcgccgtcgccgtacggcgatacggagccatcgcaagctcaagctctattcgacgccacggcggccgtgcacaacattttgatgtacggagacagcgaatcctcggtcagctacgacgccggcgcggcatcgatgcagttttcccagctgctcaggacctcggtgcccgcgtctacgcctacgcctacgcaaggcgacggcgtcagcgtcggcgtcggcgctccgatgcagtacttgtccggcagcagttacctgcctttcggtggcccgctgccgtctcaccttctcttgcaggccctgcaggcggctaagcccaatagccgcagctccaacgctaactctccgtcggcgaaggacgactgctctccaccaccggcggcgacgaggaaaagcgtctccgagccgcctgccgccgcgaaaaggccacggatcgaggcgccatcgccgctaccgacttttaaggtgcggaaagagaagctaggggacagaatcactgcgctccagcaactcgtctcgccttttggaaagactgataccgcatcggttcttcacgaggccatcgaatacatcaaattccttcacgaccaagttgcgtcactgagctctccctacttgaaaaatgggatccccatgaagcaattccagcacaagggctctgaggattccaaggataacggcgacacgaagcaagcagacctgcggagccggggcctgtgccttgtcccagtagcgagcacatacacggtggcggccgagacaccggagttctggcaccctacatttggaggcacattccgatggtgatgatcgtccagttttagtagcaagctaagtagcctgctgagacggaaagcaagaagtcatgatgcggcccaaagcaatcgaaggatgttttgcaagggaaaagatgtacgagatggatatgataataggtttccagtggtctcttctaagacatgcatgctggatcaggtgcagaagagagaatgattaattgaggccgtgtgtatgtgtggcacctatactcatatatatgcatgcatgcaactttgcaagcaaataattagtgacagctatat

SEQ ID NO: 920 - protein, 390 aa, Zea mays
  misc_feature (1)..(390): Ceres CDNA ID no. 23778739
  misc_feature (1)..(390): Also Known As  Ceres SEEDLINE ME12103
  misc_feature: Phenotype: Late Flowering Useful for delaying flowering time
  misc_feature: Phenotype: Lanceolate Shaped Useful for making plants with increased biomass and foliage
MAEQWWGSASHRSHGTSACSAAAPPPLTVTGRVACGSTFPTAAVESTSSVTFQDPYRSSTHQPLSDAASSLGDPHLDWTQTFLSGRSDASFQAVLQEPSATNDPLIRDHMDMGAGFLADQAQLAPSPYGDTEPSQAQALFDATAAVHNILMYGDSESSVSYDAGAASMQFSQLLRTSVPASTPTPTQGDGVSVGVGAPMQYLSGSSYLPFGGPLPSHLLLQALQAAKPNSRSSNANSPSAKDDCSPPPAATRKSVSEPPAAAKRPRIEAPSPLPTFKVRKEKLGDRITALQQLVSPFGKTDTASVLHEAIEYIKFLHDQVASLSSPYLKNGIPMKQFQHKGSEDSKDNGDTKQADLRSRGLCLVPVASTYTVAAETPEFWHPTFGGTFRW

SEQ ID NO: 921 - protein, 392 aa, Oryza sativa subsp. japonica
  misc_feature (1)..(392): Public GI no. 53792455
  misc_feature (1)..(392)
  Functional Homolog of CDNA ID no. 23778739at SEQ ID no. 920with e-value of 1.7E-110 and percent identity of 70.14
MADEWWSASQRSHGTSACSAAPSPLTADRVSCGWTSPAAAAAAESTSSITFQDPSRSSAAHHQPLSDAASSLGDPHMVDWTQAFLSGRSDASFQAVLQDDMAASTRPFRAQPTAADEAVMTNPFRDMGVGQGLLLDQASAPLHGLSFDAGEPAVAPATHSITTSFGDYQHSASYDAAAAVMQFSQTPRAPSLPAAAQMQFLSGSYQLPFGGAPPLPSQLLLQAMQPKPSCSSNANTLLAKSNSGSAQQICSSEGRKSVSDSPAAAKRPRIEVPSPLPTFKVRKEKLGDRITALQQLVSPFGKTDTASVLHEAIEYIKFLHEQVASLSSPYLKNGNPLQHFQQKGSESTKDAEQPKPDLRSRGLCLVPVASTYTVASETVPEFWHPTFGGTFR

SEQ ID NO: 922 - protein, 373 aa, Oryza sativa subsp. japonica
  misc_feature (1)..(373): Public GI no. 34910130
  misc_feature (1)..(373)
  Functional Homolog of CDNA ID no. 23778739at SEQ ID no. 920with e-value of 6.8E-98 and percent identity of 69.94
MADEWWSASQRSHGTSACSAAPSPLTADRVSCGWTSPAAAAAAESTSSITFQDPSRSSAAHHQPLSDAASSLGDPHMVDWTQAFLSGRSDASFQAVLQDDMAASTRPFRAQPTAADEAVMTNPFRDMGVGQGLLLDQASAPLHGLSFDAGEPAVAPATHSITTSFGDYQHSASYDAAAAVMQFSQTPRAPSLPAAAQMQFLSGSYQLPFGGAPPLPSQLLLQAMQPKPSCSSNANTLLAKSNSGSAQQICSSEGRKSVSDSPAAAKRPRIEVPSPLPTFKVRKEKLGDRITALQQLVSPFGKTDTASVLHEAIEYIKFLHEQVAGSESTKDAEQPKPDLRSRGLCLVPVASTYTVASETVPEFWHPTFGGTFR

SEQ ID NO: 923 - DNA, 1404 bp, Populus balsamifera subsp. trichocarpa
  misc_feature (1)..(1404): Ceres GDNA ANNOT ID no. 1465903
atggcagaggagtttcaggccgggatttgtggcgagaactggtggatgaattcttcgaaaagcatgttcatcggcggcttatcaccatgttctacggtgagcctccctagtgatcatatgggaacttataatgggtcatgggccacggctgatatggtagacttgaagccgaggtcaatatcatgcaaggagtctcataacactacttcggtgtctgatacctctatagctttcctaaattctccaaagcctcaacaggctaattcagatagtgggggtagcagtaatttgattgattccaccttgcaaatgatggggttcgggctctcgtcgtcgtcgtcgtcatcggattggaaccaagctttactctctgggaatggaagaactgagagttacaattccatgctgcaagaagacatgaattcaggaggactaaactcttctcaaatccgaaaagattggagtccaaagagctatgcaagaactgctgaagatttctccttggaccaacaaaggctaaatccggttaacagttccagcaattcgccaccaacttgccagggattttctacaggcttttcaatggagccaacagcttcttattgctacccttcaacattgatacaaagtttatttgaaccagatcatcttcaaccacaacaagtacaatctcttttcaacaaccggcccatgaattacctgtcgccgacagctccaaattatgggaccaacatgagtgaattgtcatctccttcttggactaaagtatctcccttgataaaatcttgtttgcaaaagcaacaggctagtagtttgcactttactaacaacacaacctactggaatgcctcaccaaccggaataaatgatattagagcaagctttttaccctcatcaccatctcaatttcttctgccaacttttcaagagaaacccaattgccccagcctcactatacagcctaacagagaagaagttcgagactcggtttcagtagttaagaaaggatgtgaaccagcattcaaaaggcctcgaattgaagcaccatctccactaccaactttcaaggtccggaaagagaagctaggggaccgaataactgccctccagcaattggtttcacctttcggaaagactgatactgcatcggttctccatgaagctattgagtatatcaagttcctccatgaccaagccactgttttaagtactccatacatgaaaaatggaaatcccattcaacatcaacaggctccagaagacaaattgaacgacctagaagggccaaaacaagatctaagaagccgaggactatgtcttgtgccaatctccagcacatttcctgttgctaatgagaccactgctgatttctggacaccaacatttggtggcactttcaggtag

SEQ ID NO: 924 - protein, 452 aa, Populus balsamifera subsp. trichocarpa
  misc_feature (1)..(452): Ceres GDNA ANNOT ID no. 1465903
  misc_feature (1)..(452)
  Functional Homolog of CDNA ID no. 23778739at SEQ ID no. 920with e-value of 9.7E-47 and percent identity of 64.37
MNSSKSMFIGGLSPCSTVSLPSDHMGTYNGSWATADMVDLKPRSISCKESHNTTSVSDTSIAFLNSPKPQQANSDSGGSSNLIDSTLQMMGFGLSSSSSSSDWNQALLSGNGRTESYNSMLQEDMNSGGLNSSQIRKDWSPKSYARTAEDFSLDQQRLNPVNSSSNSPPTCQGFSTGFSMEPTASYCYPSTLIQSLFEPDHLQPQQVQSLFNNRPMNYLSPTAPNYGTNMSELSSPSWTKVSPLIKSCLQKQQASSLHFTNNTTYWNASPTGINDIRASFLPSSPSQFLLPTFQEKPNCPSLTIQPNREEVRDSVSVVKKGCEPAFKRPRIEAPSPLPTFKVRKEKLGDRITALQQLVSPFGKTDTASVLHEAIEYIKFLHDQATVLSTPYMKNGNPIQHQQAPEDKLNDLEGPKQDLRSRGLCLVPISSTFPVANETTADFWTPTFGGTFR

SEQ ID NO: 925 - protein, 495 aa, Glycine max
  misc_feature (1)..(495): Ceres CLONE ID no. 527538
  misc_feature (1)..(495)
  Functional Homolog of CDNA ID no. 23778739at SEQ ID no. 920with e-value of 1.2E-45 and percent identity of 38.06
MAEEFQARICGENWWSSTTIDSTRSTVLFPLSSSSSSSSISSSPCSVAANNYDAGNYSTRGTSDMDLKATKCCAEETNNSLVSDTTYLGFVDAHKPHKSESAASGSGGMLTDSTLQMMGFGLTSSSENWNQPLLFRCNGRAESNFHSLIQEETGIDSSNSQIHRDWIPKSFSSDGGKQQIDDNNFKPLLLNQQEFSLDDHSLSSLTTAGLSSNRGFPNGSASSYGNPSTLQSLYDPNYNPHPQHSLFTNRPMSYSSKACYGTPCTELPTLSKASTFFKPTTTTIAKQQHPNIGLHFSNNTPFWNASAEALHDIRVGTFASTQSQYQRPTFDDEEKPNFPITLLNRLNSEEILELASMAKKNVCEPALKRPRIETPSPLPTFKVRKEKLGDRVTALQQLVSPFGKTDTASVLHEAIEYIKFLHDQVNVLSTSYMKNGAPTQQQQGCDDLKDSEGPQQDLKSKGLCLVPISSTFPVATGATSADQLWTPTFRGALLR

SEQ ID NO: 926 - protein, 323 aa, Oryza sativa subsp. japonica
  misc_feature (1)..(323): Public GI no. 53749368
  misc_feature (1)..(323)
  Functional Homolog of CDNA ID no. 23778739at SEQ ID no. 920with e-value of 1.5E-54 and percent identity of 52.68
MADEHEWWNSPCSARTGDDEAACSTADADESAVGSTPMSFGHGGQPASLSDAAASSSSSSFLLAGQHMDYWTQDFMGGRAAAAATASFDTLLQLQLQGGDAASRRLLLGDHAAAPPRHLVVPGAPYGGGGGDDTAAPPRGLSPTPYEAADNLQQQQSFPGGHHVVSNTDRLHDHHQDAGSPSPATRSSPGSPAAAKKPRIEAPSPMPTFKVRKEKLGDRITALQQLVSPFGKTDTASVLHEAIEYIKFLHDQVASLSSPYLRCGRPVQLQHQQGSHKVNGNCEGKQLDLRSRGLCLVPVASTYTVASETATEFWHPTFGGTFR

SEQ ID NO: 927 - protein, 375 aa, Brassica napus
  misc_feature (1)..(375): Ceres CLONE ID no. 954923
  misc_feature (1)..(375)
  Functional Homolog of CDNA ID no. 23778739at SEQ ID no. 920with e-value of 2.2E-20 and percent identity of 26.26
MVAGNPNWWNVSGSTRPPPPLMGHQQGPLPPQMTPNNNYLRPRMMMTSSSPSLLDNPSLSSWLESNDLPPESWSLSQLLLGGLMMGEEERLEIMNHHSHHDEQHHHSFQGKMRLENWEEQVLRHQQASMGVVDIKQESNINNNNGYLISSPNSPPNKSCVTTTTTTSLNSNDNTNNNNNMLGFSSNHNGLNLSEIRHTPPDRSSECNSLDIGGSTNKKPRLQPSPSSQSTLKVRKEKLGGRIAVLHQLVSPFGKTDTASVLSEAIGYIRFLQNQIEALSHPYFGTTASGNMRNQHLQGDRSCLFPEDPGQLVTDQCVKRRGVSSSSSENQNAKEEPKKDLRSRGLCLVPISYTLQVGSDNGADYWAPTLGSASFH

SEQ ID NO: 928 - protein, 389 aa, Brassica napus
  misc_feature (1)..(389): Public GI no. 11045087
  misc_feature (1)..(389)
  Functional Homolog of CDNA ID no. 23778739at SEQ ID no. 920with e-value of 2.1E-20 and percent identity of 26.26
MNRGALESSPVQQLMVAGNPNWWNVSGSTRPPPPLMGHQQGPLPPQMTPNNNYLRPRMMMTSSSPSLLDNPSLSSWLESNDLPPESWSLSQLLLGGLMMGEEERLEIMNHHSHHDEQHHHSFQGKMRLENWEEQVLRHQQASMGVVDIKQESNINNNNGYLISSPNSPPNKSCVTTTTTTSLNSNDNTNNNNNMLGFSSNHNGLNLSEIRHTPPDRSSECNSLDIGGSTNKKPRLQPSPSSQSTLKVRKEKLGGRIAVLHQLVSPFGKTDTASVLSEAIGYIRFLQNQIEALSHPYFGTTASGNMRNQHLQGDRSCLFPEDPGQLVTDQCVKRRGVSSSSSENQNAKEEPKKDLRSRGLCLVPISYTLQVGSDNGADYWAPTLGSASFH

SEQ ID NO: 929 - protein, 437 aa, Oryza sativa subsp. japonica
  misc_feature (1)..(437): Public GI no. 21741062
  misc_feature (1)..(437)
  Functional Homolog of CDNA ID no. 23778739at SEQ ID no. 920with e-value of 3E-45 and percent identity of 44.05
MGDHQMMHAAPAAMYNGGGGTTSSHGVWWSNAVGVPAAATCSTTTELAGYTAWSSALAAGYDGMVADNGGKQAKSTTTASSESPGNNSSVTFQEPASIPDPAAVAAVPQPGLAGFTDWTQPFMNNGAGLHEFLQDGHHDMSASSLMNHSSNNLALQQAGHHHELLSSFGSDLLLSPTSPYGGFQSSLLRSLMEPTAKQQQQQPALAGLQQYHQYQQQMGHAPAAAAKFAQAVGARDSLQFTNDAPFWNPSAGFGMPAAVAVAAAAAQDQASVRSAKRSSPAPPRAAATLALKTAMEGVGDSSSVITKKETAFKKPRLETPSPLPTFKVRKEKLGDRITALQQLVSPFGKTDTASVLHETIEYIKFLHDQVGALSAPYLKNGAHQVPHLKNSSPDKSKHGEISLKGRGLCLVPISSTFAVASEVPVELWTPFGANFIR

SEQ ID NO: 930 - protein, 461 aa, Triticum aestivum
  misc_feature (1)..(461): Ceres CLONE ID no. 861529
  misc_feature (1)..(461)
  Functional Homolog of CDNA ID no. 23778739at SEQ ID no. 920with e-value of 6.4E-23 and percent identity of 27.44
MHLHAGEVHLQYFMPRQQQDATDLPDLAASTSSAASPAATMWEYHQAHAALQPSPSWSPYTGPSTAALLDGSTFAADSVAGAADMRLPVGEHVHGQAWSHDELSNDNTGYRENFLDLLASKNVTQEMFEDVPAGRYAAAPALAARFEAGSDVSPIKYEVVASPLFMGSGSNAALEAQGMNMMSGMPSYADDHHHHQRKEGINHPQQEHGNPMASFLQHISTRTSAAMHASLDYSGLGALDKICQDGRAMEAASPFSLRSLPDFGSIGGYKPTKESTLVPPYMRSADRPDRSRQEQEILPARSSSSGSGPPAATDRKKRTSEERRESTVKKSKQEASTASPPKQPVPKVKLGEKITALQQIVSPFGKTDTASVLFETIKYIKFLHEQVQLLSEPYTNASRNKGNCSNLLPWGERAEASKGEGEHDLRERGLCLVPVSWTPEVYRDGNAMDYWTPAYRGCLYR

SEQ ID NO: 931 - DNA, 1401 bp, Populus balsamifera subsp. trichocarpa
  misc_feature (1)..(1401): Ceres GDNA ANNOT ID no. 1448710
atggcggaggagtttcaggccgggatttgtggcgaaaactggtggatgaattcgtcgaaaagcgtgttcatgggcggcttgtcaccatgttctacggtgagcatcactagtgatcatatgggaacttatggatcatggaccacggctgatatggtagacttgaaggcaaggtcaatatcatgcaaggagtctaatcatattactacctcagtgtccgatgcctctatacctttcctaaattctcagaaacctcaacaggctgattcagatagtggtggtagcagtattttgattgactccaccttgcaaatgatggggtatggcctttcgtcgtcatcttcgtcatcatcggattggaaccaagctttacttcctgggaatggaagaactgagagttacaactccatgatgcaagaagagatgaattcaggaggactaaactcttctcaaatccaaaaagattggagtccaaagagctatacaagcactgctgaagatttttccttggatcaacaaaggctaaatccggttaacagttccggcaattcgccaccaacttgccagggattttctacaggcttttcaatggagccatcagcatcttatggctacccttcaacattgatacaaagtttatttgaacctgaatatcctcaaccacaacaagcacaatctcttttcaacaacaggttcatgaattacttgtcgccaacagctccaaattatgggaccaacatgactgaattgtcatctccttcttggcctaaagtatctccgttaataaaacctttgccaaagcaacagcctagcactttgcactttactaacaacacaccctattggaatgcctcgccaactggaataaacgatattagagcaaaccttttaccctcatcacagtctcaatttcttgtgccagcttttgaagagaaatccaattgctccaacctcactacaaagcctagcaaagaagttcgagactcggtttcggtagttaagaaaggaagcgaaccagctttcaaaaggcctcgaattgaaacaccatctccattaccaaccttcaaggtccggaaagagaagctaggagaccgaataactgccctccagcaattggtttcacctttcggaaagactgatactgcatcggttctccatgaagctatcgagtacatcaagttccttcatgatcaagtcagtgtgttaagtactccatatatgaaaaatggcaaccccattcaccatcagcaggctccagctgacaaactgaatgacctagaagggccaaaacaagatctaagaagcagaggactatgtcttgtgcctgtctccagcacatttcctgttgctaatgagaccacagctgatttctggacaccaacatttggtggtactttcaggtag

SEQ ID NO: 932 - protein, 451 aa, Populus balsamifera subsp. trichocarpa
  misc_feature (1)..(451): Ceres GDNA ANNOT ID no. 1448710
  misc_feature (1)..(451)
  Functional Homolog of CDNA ID no. 23778739at SEQ ID no. 920with e-value of 4.2E-46 and percent identity of 42.38
MNSSKSVFMGGLSPCSTVSITSDHMGTYGSWTTADMVDLKARSISCKESNHITTSVSDASIPFLNSQKPQQADSDSGGSSILIDSTLQMMGYGLSSSSSSSSDWNQALLPGNGRTESYNSMMQEEMNSGGLNSSQIQKDWSPKSYTSTAEDFSLDQQRLNPVNSSGNSPPTCQGFSTGFSMEPSASYGYPSTLIQSLFEPEYPQPQQAQSLFNNRFMNYLSPTAPNYGTNMTELSSPSWPKVSPLIKPLPKQQPSTLHFTNNTPYWNASPTGINDIRANLLPSSQSQFLVPAFEEKSNCSNLTTKPSKEVRDSVSVVKKGSEPAFKRPRIETPSPLPTFKVRKEKLGDRITALQQLVSPFGKTDTASVLHEAIEYIKFLHDQVSVLSTPYMKNGNPIHHQQAPADKLNDLEGPKQDLRSRGLCLVPVSSTFPVANETTADFWTPTFGGTFR

SEQ ID NO: 933 - protein, 304 aa, Solanum tuberosum
  misc_feature (1)..(304): Public GI no. 77999289
  misc_feature (1)..(304)
  Functional Homolog of CDNA ID no. 23778739at SEQ ID no. 920with e-value of 0.0000048 and percent identity of 41.77
MAANQPEAYADDFLEQILAIPSYSGLPVADVGTPSETTSFTSASAVSHLNSAAAAGLQQPLFPLGLSLDNGRDDVSEAGAYAVKHERDGMNIGNLYAGLEHLQSHAVRHSVPSIHHVQPFQGPPTTSTTVTVPHPPSIRPRVRARRGQATDPHSIAERLRRERISERIKALQELVPSCNKTDRAAMLDEILDYVKFLRLQVKVLSMSRLGGASAVAQLVADIPLQSVEGDSGESRSNQHIWDKWSNVDTEREVAKLMEEDVGAAMQYLQSKSLCIMPISLAALIYPTQLPDDQSLVKPEAAAPS

SEQ ID NO: 934 - DNA, 1426 bp, Zea mays
  misc_feature (1)..(1426): Ceres CDNA ID no. 23800158
  misc_feature (1)..(1426): Also Known As  Ceres SEEDLINE ME12132
atctaatcatacaaattgctgacctccgtcatcagcatcttctctctctctctctctctgctgagctgcttactcattccagcttcaattttctttgtccgtgatctagctagcttgcatgtctctctagagtcgatctgaatcgatacaattgagactagctactacgagtttgcagatgcatagctagctagctctcaatcacatgaactcctccagcgccaccgctatggatcaaataggcaagtactggggcatgtggggagcaaggagaagcagcagcagcagcagcacgatccccatctctgcttgggctgcggcgtacggcggcagcagcgagccgtcgtgggaggagcaggccttcgcacgcgacgcggcggaacacctcggcggctgcgtctggccgccgcgctcctactcgtgcaccttctgccagcgcgagttccggtcggcgcaggcactcggtggccacatgaacgtccaccgccgcgaccgagctcttctccggctggggggctcgtcctcccccgaggacgtgcacgccaccaccaacgatcagccacacccgcagcaaggtgctctcctgtacagggcagcagcctctaaccctagcactaccacgccgagtactactgcagctgcaggtactactgctgccggcccagcagcagccataaccatagcaggtgcaggggatggagatgccaacaccaccaccaccactacttacttgtcaagaattatcaaggagagcaagaacaagcgcttcatgcccatgccagatcactctgtcgcggggatgagagaagatcaggcggcggccatagatgatcatcgtcataatgaagatggcgacagctggcggtcagcctcagccgcgaaaaagaggaggcgtctggatcatccgttggcaacggcggcggcgcttctgatctttgtgcagccagcaccaaaggccgctaccaatgttgcagcatgtgaatcacaaggaggagctgatcatgagacaaaggtaccgcacacgacaaccctaacaagccctagctctagttcccctcttcttctggatcaacgacatgaattggatctagagctaaggcttgggactacaccaaaagttacgtacatacatggcaacgatacacgaagctagctagctagttcgtctgcacgctagtagttattaagcagatcgatttatttggtcttttgaatttactatcatatcactagttactcttgcttggttgttcatcatctttctcctcttcaatttctccccctttttcctttcttctgctatccatggggccgtacagactattacattttttggccaaagagctatacctctccctctttcaattcaatctcaactattgttcttgtttcaatacatacataaaaagttaaggggcatacgaat

SEQ ID NO: 935 - protein, 298 aa, Zea mays
  misc_feature (1)..(298): Ceres CDNA ID no. 23800158
  misc_feature (1)..(298): Also Known As  Ceres SEEDLINE ME12132
  misc_feature (54)..(76): Pfam Name: zf-C2H2 Pfam Description: Zinc finger, C2H2 type
  misc_feature: Phenotype: Dark Green Useful for increasing chlorophyll and photosynthetic capacity
  misc_feature: Phenotype: Curled 3 Useful for making plants with altered leaf shape e.g., curled leaves
MWGARRSSSSSSTIPISAWAAAYGGSSEPSWEEQAFARDAAEHLGGCVWPPRSYSCTFCQREFRSAQALGGHMNVHRRDRALLRLGGSSSPEDVHATTNDQPHPQQGALLYRAAASNPSTTTPSTTAAAGTTAAGPAAAITIAGAGDGDANTTTTTTYLSRIIKESKNKRFMPMPDHSVAGMREDQAAAIDDHRHNEDGDSWRSASAAKKRRRLDHPLATAAALLIFVQPAPKAATNVAACESQGGADHETKVPHTTTLTSPSSSSPLLLDQRHELDLELRLGTTPKVTYIHGNDTRS

SEQ ID NO: 936 - DNA, 873 bp, Populus balsamifera subsp. trichocarpa; identical to SEQ ID NO: 679
  misc_feature (1)..(873): Ceres GDNA ANNOT ID no. 1464833

SEQ ID NO: 937 - protein, 281 aa, Populus balsamifera subsp. trichocarpa
  misc_feature (1)..(281): Ceres GDNA ANNOT ID no. 1464833
  misc_feature (1)..(281)
  Functional Homolog of CDNA ID no. 23800158at SEQ ID no. 935with e-value of 5.2E-27 and percent identity of 79.03
MKRKQLLKSQLPASMKSISGSWEEKAFAEDSSGHLGGCIWPPRSYSCSFCSREFRSAQALGGHMNVHRRDRARLKQSLSPHNYVFQHQNHIQSSLKPLGSHFPSDQVCTLDNYDLDPKLSVSRATNIASTLSNQENLSEHAFVSPPSSSFVQEQHKGYPYLHDNLSGSDHSLSARLHSKPEAERNQGEVKVTCLNHDKFVATDLFMDLGSVINSHGLLSPGSCGDEAISCKRPRTNVSVLSLLVKPRPNDRYILQSEATGPTSSSKEGIDLELRLGETPKK

SEQ ID NO: 938 - protein, 247 aa, Gossypium hirsutum
  misc_feature (1)..(247): Public GI no. 77378044
  misc_feature (1)..(247)
  Functional Homolog of CDNA ID no. 23800158at SEQ ID no. 935with e-value of 8.3E-28 and percent identity of 71.43
MEQGRYWMWTKRRHGLTSHHHHHHHHHHHVESSTKEGAYYDSWEEQAFAEDACGTLGGCIWPPRSYSCSFCGREFRSAQALGGHMNVHRRDRARLKQSPPSPSPPHHEHHHHQNNIQDPFLPLGFPCQPDEVCNFLYNPNPNSNHGTTKQDCPGPPLFSSPKPWSNLTADRYGGDKSPRTLVVRETHKEDITVGCKRKRTDDHTPTMTLLPFFLEPISIQKHHHHHPPADEDNNIDLELRLGLNAQS

SEQ ID NO: 939 - protein, 245 aa, Oryza sativa subsp. japonica
  misc_feature (1)..(245): Public GI no. 62733300
  misc_feature (1)..(245)
  Functional Homolog of CDNA ID no. 23800158at SEQ ID no. 935with e-value of 2.4E-32 and percent identity of 67.01
MEEQRGEEEWVMWGSAGRRRIIRQSASWEEQAFARDAAANANLGGCVWPPRFYTCSFCQREFRSAQALGGHMNVHRRDRARLRQRQTSSSSSPSHQEEEAEAPQDQQAGPYYTSFSKPSTTSTDNTTCSNDILLLARDQETIKKRVPRQQVQVVADQDEDEPAGRRYKRRRLGLVDQLPSSCEGGDHHHQVLIITPTTAAASPSSIIASASALVVGDQQHQQAGSVLDLELRLGTSTPPKAVVHA

SEQ ID NO: 940 - protein, 288 aa, Zea mays; identical to SEQ ID NO: 688
  misc_feature (1)..(288): Ceres CLONE ID no. 393033
  misc_feature (1)..(288)
  Functional Homolog of CDNA ID no. 23800158at SEQ ID no. 935with e-value of 7.2E-39 and percent identity of 39.08

SEQ ID NO: 941 - DNA, 1253 bp, Zea mays
  misc_feature (1)..(1253): Ceres CDNA ID no. 23802651
  misc_feature (1)..(1253): Also Known As  Ceres SEEDLINE ME12137
aagctctctcatccagctaactaatggaagtagctagcaaacgtacgtattcttcttcaccatctgtttcttggggaaattaaaccccagtacgcgtacgtcacaatcgcgcgcaatggagaaggagaaggagaagtccagggccaggccgtcgaggggccactggcggcccggcgaggacgacaagctgcggcagctcgtcgacaagtacggcccgcggaactggaactccattgctgagagtctggaggggagatcaggcaagagctgccggctacgatggttcaaccagcttgacccgcggatcaaccggcggcccttcacggtggcggaggaggagctgctcctgcgggcgcaccgcgcccacggcaaccgctgggcgatcatctcccgcctcttcccgggccgcaccgacaacgccgtcaagaaccactggcacgtcgtcatggcgcgccgccgccgccgtaccctcgtcggcgaggccgcagccatcggctctgtcgttgtaccgcctcgtcatcagtacttccattttggaagctgctcgccgccgccgccgacccgctcgctgtgcttcgcggtgcctgcaggtttcggtccgctcggactcagcagaccagctgcaagttgcggtgtcaggaactgcaatgtgcccactgccgtcgcattactggacgacggccatcgtcatgacatgagcaaagaccttggtggcgacgatgacaatggcggtgatgcgcttgcaaagaggaaggacgtgcaattcttcgacttcttgggcgtcgggatctaaagcaaaataatgatgctactaatggtacattaattagtacactacatttcaacgatacactattggggtcttcttttccgtcgaagattcttttaaaaaacatcttcgacaaaatgatacaaaggatcaccgaagccaccttcagtctcgatttatctcctcaagacgaagactctgtatagagccgacagtgcaagatgccgaagctcaatggcctcagcccacatcaagcaaggaaggaaaaaggactagataggccttattggttttaattacttgtaaacaagtgttcaagggcatggatgtaattttaccgggctgcgtcccgtgactataaatagatgaacagtaccccgaccgtactattcacgctggattgtaatcactctcgcatcatcctcgttctctcaccttttggcaagccgaaagtaccaatataatatgaatattgttgatgttt

SEQ ID NO: 942 - protein, 225 aa, Zea mays
  misc_feature (1)..(225): Ceres CDNA ID no. 23802651
  misc_feature (1)..(225): Also Known As  Ceres SEEDLINE ME12137
  misc_feature (66)..(111): Pfam Name: Myb_DNA-binding Pfam Description: Myb-like DNA-binding domain
  misc_feature: Phenotype: Dark Green Useful for increasing chlorophyll and photosynthetic capacity
  misc_feature: Phenotype: Cup-shaped Useful for making plants with altered leaf shape e.g., curled leaves
  misc_feature: Phenotype: Serrate Margins Useful for making plants with increased biomass and foliage
MEKEKEKSRARPSRGHWRPGEDDKLRQLVDKYGPRNWNSIAESLEGRSGKSCRLRWFNQLDPRINRRPFTVAEEELLLRAHRAHGNRWAIISRLFPGRTDNAVKNHWHVVMARRRRRTLVGEAAAIGSVVVPPRHQYFHFGSCSPPPPTRSLCFAVPAGFGPLGLSRPAASCGVRNCNVPTAVALLDDGHRHDMSKDLGGDDDNGGDALAKRKDVQFFDFLGVGI

SEQ ID NO: 943 - DNA, 1005 bp, Populus balsamifera subsp. trichocarpa
  misc_feature (1)..(1005): Ceres GDNA ANNOT ID no. 1452212
atggaggaatctttggctggtaattcgagtgatgatgcaaagagtactgcttgccctagaggtcactggagacctgctgaggacgacaaactcaggcaacttgttgaacaatatggtgcacaaaactggaattctattgcagagaagctccaaggaagatcagggaagagttgcagattgaggtggtttaatcaacttgatcctagaatcaacaggagacctttcagtgaagaggaagaagagagactactagcagctcatcggattcatggtaacaaatgggcactcatagccagactatttccaggtcgaacagataatgctgtgaaaaatcattggcatgtcataatggcaagaaggcaaagggaacagtccaagctatgtggaaagagaagttatcaagataatctaagtgaatccaatgccactaatagttcacatgcagggaaatcaagagctcaagatgtgttcaattcaagaattggatttgatgactctagagtcttggaatttcgaaaccccggtaaagataggatattgtcaatatctccttctggttcttcaccttcttggaatttcgccccatcaactatagcagcttcaaacaattcttcttcagtggatttatcgagaagggaaggaagggataattacttcaattcaagtttattttgcaccactgagagctccaaattaatctccgatcaacctatttatagatactatacgaattcttcggtgtgtggcagctaccggagttcaagtatattcgggcttccaaactatagaagggttgttccaagtccttttggatcataccttaaacttggagatgattatgaaaaccacggaatgatcaagaaagagttggcaagttgccataattcatcgacattaaataatttaagagcgacgagtaatcatcaagagaaaggagatcatgaatctatcaaacacaaggatgctcctttcatagattttcttggtgtgggtatatcttcttga

SEQ ID NO: 944 - protein, 334 aa, Populus balsamifera subsp. trichocarpa
  misc_feature (1)..(334): Ceres GDNA ANNOT ID no. 1452212
  misc_feature (1)..(334)
  Functional Homolog of CDNA ID no. 23802651at SEQ ID no. 942with e-value of 6E-51 and percent identity of 81.65
MEESLAGNSSDDAKSTACPRGHWRPAEDDKLRQLVEQYGAQNWNSIAEKLQGRSGKSCRLRWFNQLDPRINRRPFSEEEEERLLAAHRIHGNKWALIARLFPGRTDNAVKNHWHVIMARRQREQSKLCGKRSYQDNLSESNATNSSHAGKSRAQDVFNSRIGFDDSRVLEFRNPGKDRILSISPSGSSPSWNFAPSTIAASNNSSSVDLSRREGRDNYFNSSLFCTTESSKLISDQPIYRYYTNSSVCGSYRSSSIFGLPNYRRVVPSPFGSYLKLGDDYENHGMIKKELASCHNSSTLNNLRATSNHQEKGDHESIKHKDAPFIDFLGVGISS

SEQ ID NO: 945 - DNA, 1047 bp, Populus balsamifera subsp. trichocarpa
  misc_feature (1)..(1047): Ceres GDNA ANNOT ID no. 1456223
atggaagatcttaaaggtagctcaagcagtgatgatgggaagactagttgtcatagagggcactggagaccagctgaagatgagaaacttcggcaacttgtcgatcaatatggtcctcagaattggaatttcatcgcggaacatcttcaaggaagatcagggaaaagttgtagattgagatggtacaaccaacttgatccaaatatcaacaaaaggccttttacagaagatgaggaagaaaggctcctaaaagctcatcagattcatggaaacagatgggcttcgatatctaggctctttcctggtagaactgacaacgctgtcaagaatcattaccatgttgttatggcaagaaggaagcgggaacgctgcttgactttccatggtaagagaaataatttccaagtccaatattctactgatcatcatcttcggtccaacagaaatagcagtactcctcctggtagcaattttgggttctttaggcctcaagtgtcacttgattatggttctaaattagggtttcagaataatattattgaaagaaagggtactaacatacccatgacctcttcaaactcatcaccctcttggactaacgttagtgcttcaaccatcacaaatgactcattaagttttgacgtctttgatgcaaaaagaaaggattatattcagtactcaagttctaattcttcattacatcctaaagagggaccacttgctttgaatgaatctcttcactgtacttaccatcctagttctaccatttataacaactaccagaatgttgttggacagcagatccctaatgctaagaaagttgatcctaataatccttttgcattgacaagttatggtgatggttatggaagcaataaagaaaagattaccgaaagccagttagtgagactcaatagcaataatcatgagccagctgcattgtggaaattgccaatggcttctcagcaagaagaaaaagatcatggaggtcaattaaagaaccaggatgttgcctttatagactttctcggtgtgggaatctcttaa

SEQ ID NO: 946 - protein, 348 aa, Populus balsamifera subsp. trichocarpa
  misc_feature (1)..(348): Ceres GDNA ANNOT ID no. 1456223
  misc_feature (1)..(348)
  Functional Homolog of CDNA ID no. 23802651at SEQ ID no. 942with e-value of 1.8E-49 and percent identity of 81.55
MEDLKGSSSSDDGKTSCHRGHWRPAEDEKLRQLVDQYGPQNWNFIAEHLQGRSGKSCRLRWYNQLDPNINKRPFTEDEEERLLKAHQIHGNRWASISRLFPGRTDNAVKNHYHVVMARRKRERCLTFHGKRNNFQVQYSTDHHLRSNRNSSTPPGSNFGFFRPQVSLDYGSKLGFQNNIIERKGTNIPMTSSNSSPSWTNVSASTITNDSLSFDVFDAKRKDYIQYSSSNSSLHPKEGPLALNESLHCTYHPSSTIYNNYQNVVGQQIPNAKKVDPNNPFALTSYGDGYGSNKEKITESQLVRLNSNNHEPAALWKLPMASQQEEKDHGGQLKNQDVAFIDFLGVGIS

SEQ ID NO: 947 - protein, 182 aa, Populus tremula x Populus tremuloides
  misc_feature (1)..(182): Public GI no. 31980093
  misc_feature (1)..(182)
  Functional Homolog of CDNA ID no. 23802651at SEQ ID no. 942with e-value of 3.2E-45 and percent identity of 51.10
MCTRGHWRPAEDEKLKELVEKYGPHNWNAIAEKLHGRSGKSCRLRWFNQLDPRINRSPFTEEEEERLLASHRIHGNRWAVIARLFPGRTDNAVKNHWHVIMARRYRERSRLHAKRTAQALVNEQNFSSKQDMQINCETRSFSSFVKKYCEKFGQYPLITHSYLPAFWKEFYNGDDPSNCEGN

SEQ ID NO: 948 - DNA, 1002 bp, Populus balsamifera subsp. trichocarpa
  misc_feature (1)..(1002): Ceres GDNA ANNOT ID no. 1443195
atggaggaatattctttggccggtaattcaagtgatgatgcaaagagtactgcttgccctagaggtcactggagacctgctgaggatgacaaactcaggcaactggttgaacaatatggtgcacaaaactggaatgatattgcagagaagctccaaggaagatcagggaagagttgcagattgaggtggtttaatcaacttgatcctagaatcaacaggagacccttcagtgaagaggaagaagagagactactagcagctcatcaagttcatggaaacaagtgggcattaatagccagagtatttccaggtcgaacggataatgctgtgaaaaatcattggcatgtaataatggcgagaaagcaaagggaacaatccaagctatgtggaaagcggagatatcaagatagtctaagtgactccaatcccccctccagtagttcgcatgcaaggaaatctaggactcaagagctgttcagttcgagaattggatttgaggactctagagagtgcgaatttcgaaaccccagtaaagataggacattctcaatatctccttctagttcttcaccttcttggaattcccccccatcaactttagcagcttcaaacaattgttctttggtggatttatcgagaaggaaaggaagagataattacttcaactcaagtttattatgcaccaccgagagctccaaagtctccgatcaatctatttatagataccatatgaattcttcagggcgtagcagcaactggagttccagtaaattcgggcttccaaactatagaagggttgttccaagtccattaggataccttaaacttggagatgattatggaaaccatggaatgatcaagaaagagttgtattgtcataattcatccacattaaagaatatgagagcgacgagtaaccatcaagagcaacgagatcatgaatctatcagacacaaggatgttccttttatagattttcttggtgtgggtatatcttcttga

SEQ ID NO: 949 - protein, 333 aa, Populus balsamifera subsp. trichocarpa
  misc_feature (1)..(333): Ceres GDNA ANNOT ID no. 1443195
  misc_feature (1)..(333)
  Functional Homolog of CDNA ID no. 23802651at SEQ ID no. 942with e-value of 1.8E-49 and percent identity of 77.98
MEEYSLAGNSSDDAKSTACPRGHWRPAEDDKLRQLVEQYGAQNWNDIAEKLQGRSGKSCRLRWFNQLDPRINRRPFSEEEEERLLAAHQVHGNKWALIARVFPGRTDNAVKNHWHVIMARKQREQSKLCGKRRYQDSLSDSNPPSSSSHARKSRTQELFSSRIGFEDSRECEFRNPSKDRTFSISPSSSSPSWNSPPSTLAASNNCSLVDLSRRKGRDNYFNSSLLCTTESSKVSDQSIYRYHMNSSGRSSNWSSSKFGLPNYRRVVPSPLGYLKLGDDYGNHGMIKKELYCHNSSTLKNMRATSNHQEQRDHESIRHKDVPFIDFLGVGISS

SEQ ID NO: 950 - protein, 338 aa, Oryza sativa subsp. japonica
  misc_feature (1)..(338): Public GI no. 50948869
  misc_feature (1)..(338)
  Functional Homolog of CDNA ID no. 23802651at SEQ ID no. 942with e-value of 2.4E-47 and percent identity of 51.56
MAHEMMGGFFGHPPPPPATAAVGEEEDEVVEETEEGGHGGGVQGKLCARGHWRPAEDAKLKDLVAQYGPQNWNLIAEKLDGRSGKSCRLRWFNQLDPRINRRAFTEEEEERLMAAHRAYGNKWALIARLFPGRTDNAVKNHWHVLMARRHREQSGAFRRRKPSSSSASPAPAPAPPPPPQPVVALHHHHHRYSQQYSGYSGAAESDESASTCTTDLSLSSGSAAAAAAAAAAANIPCCFYQSTPRASSSSTAACRAPRVAAAADTVAFFPGAGYDFAAAPHAMAPAAASTFAPSARSAFSAPAGRGEPPGAVDQRGGAQATTDSHTIPFFDFLGVGAT

SEQ ID NO: 951 - protein, 405 aa, Glycine max
  misc_feature (1)..(405): Ceres CLONE ID no. 520052
  misc_feature (1)..(405)
  Functional Homolog of CDNA ID no. 23802651at SEQ ID no. 942with e-value of 1.9E-45 and percent identity of 50.22
MSSSQHLNNVGEDSSSRDMSFFPPSSRYVGSSQTQTPPLSLSHGNGVEGSNSNPEMGLLIFASTVFQQPQECRGTKRAIDEEEEEEEEDEEEEEGVDEIENNKNLCLKLGGDEAQAAKSSASGKTKLCARGHWRPAEDEKLKELVAQYGPQNWNLIAENLEGRSGKSCRLRWFNQLDPRINRRSFSEEEEERLLTAHRMYGNKWAMIARLFPGRTDNAVKNHWHVIMARRQREHSSRVYRRRKLVVNETVLPKGLNLTLSNNNAGSESTISSTIDESASTCTNLSLTPPSSAKVTPPFGRLFDHHGPSQNHHQAFGSLIGQAIGDVSFNKKFCGASWNGVAYKKAEQVGKLKGVDQSNFSDANSEVSVSESVATNRSNVSISEESETVGDKINMPFIDFLGVGAT

SEQ ID NO: 952 - protein, 265 aa, Oryza sativa subsp. japonica
  misc_feature (1)..(265): Public GI no. 56783716
  misc_feature (1)..(265)
  Functional Homolog of CDNA ID no. 23802651at SEQ ID no. 942with e-value of 1.6E-46 and percent identity of 77.88
MAHEMMGGFFGHPPPPPATAAVGEEEDEVVEETEEGGHGGGVQGKLCARGHWRPAEDAKLKDLVAQYGPQNWNLIAEKLDGRSGKSCRLRWFNQLDPRINRRAFTEEEEERLMAAHRAYGNKWALIARLFPGRTDNAVKNHWHVLMARRHREQSGAFRRRKPSSSSASPAPAPAPPPPPQPVVALHHHHHRYSQQYSGYSGAAESDESASTCTTDLSLSSGSAAAAAAAAAAANIPCCFYQRGGAQATTDSHTIPFFDFLGVGAT

SEQ ID NO: 953 - protein, 354 aa, Triticum aestivum
  misc_feature (1)..(354): Ceres CLONE ID no. 782178
  misc_feature (1)..(354)
  Functional Homolog of CDNA ID no. 23802651at SEQ ID no. 942with e-value of 1.6E-34 and percent identity of 74.44
MPSSSACPPWLVRMVAANDDQASSSSSSKGGVAVLTTGTPTIDTGYRGGGGEGGNAADPQESSSSGQSRLAARGHWRPAEDMKLRELVALYGPQNWNLIAEKLDGRSGKSCRLRWFNQLDPRISKRPFSDEEEEKLTAAHRFYGNKWSMIARLFPGRTDNAVKNHWHVIMARKYREQSIAYRRRKLNQAVQRKLDSSSGVAAGAGHADVVGHHHNHLLLAANDSAIFADPYGFSFSHCCLSFPAGAAAASALEPTFCLFPGPGAASNSVHDGRLSWPDAMAVRGGAGGGGLHWEPLPAQGGWIGGGRHEMARFDSDQANGASAAVFAVTDQAGVHLDGASRSPTFIDFLGVGAT

SEQ ID NO: 954 - protein, 267 aa, Oryza sativa
  misc_feature (1)..(267): Public GI no. 6979341
  misc_feature (1)..(267)
  Functional Homolog of CDNA ID no. 23802651at SEQ ID no. 942with e-value of 2.9E-51 and percent identity of 55.11
MASSSTTNTSDGAGKPASSSSSACPRGHWRPGEDEKLRQLVEKYGPQNWNSIAEKLEGRSGKSCRLRWFNQLDPRINKRPFTEEEEERLLAAHRHHGNKWALIARHFPGRTDNAVKNHWHVVRARRSRERSRLLARAAAAAAHPPPFSSYASQLDFSGGGASSGARNSSLCFGFGMINRSSSSSSSPAAAPFLIKSFNGTSYGTLLPATTSMAAAAQPVSTITFSSTPMRETLELMDAGGHENHGDVDGGGDKRKGVPYFDFLGVGV

SEQ ID NO: 955 - protein, 110 aa, Brassica napus
  misc_feature (1)..(110): Ceres CLONE ID no. 1083737
  misc_feature (1)..(110)
  Functional Homolog of CDNA ID no. 23802651at SEQ ID no. 942with e-value of 3.8E-33 and percent identity of 60.75
MMHQENKKKHLSKVCTRGHWKPSEDFKLQELVTVFGPKKWNHIARKMQGRTGKSCRLRWFNQLDPRIIKSAFSEEEEEKLLAVHRTFGNKWSLIAKLFPGRTDNAVKNHW

SEQ ID NO: 956 - protein, 126 aa, Parthenium argentatum
  misc_feature (1)..(126): Ceres CLONE ID no. 1603814
  misc_feature (1)..(126)
  Functional Homolog of CDNA ID no. 23802651at SEQ ID no. 942with e-value of 2.2E-30 and percent identity of 48.89
MDRIKGPWSPEEDEMLQRLVEKHGPRNWSLIGKSIPGRSGKSCRLRWCNQLSPQVEHRAFTPEEDETILRAHARFGNKWATIARLLNGRTDNAIKNHWNSTLKRKCSSMTNEEFNEFAVHQPLLKR

SEQ ID NO: 957 - DNA, 1563 bp, Zea mays
  misc_feature (1)..(1563): Ceres CDNA ID no. 23803323
  misc_feature (1)..(1563)
  Functional Homolog of CDNA ID no. 23803323at SEQ ID no. 958with e-value of 0 and percent identity of 100.00
  misc_feature (1)..(1563): Also Known As  Ceres SEEDLINE ME12139
  misc_feature (1)..(1563): Also Known As  Ceres CLONE ID no. 389639
  misc_feature (588)..(588): n is a, c, t, g, unknown, or other
tctctagtgtagtgtagggtcaggactcaggagtgaccgagctgagcacacccgccggccgccacccggcacggcgtcggcagcaacccacactatttactcccgcgccggcctctgtttccgcaccaccgcaccgtgccacgcactccaaagatccccgcgaataaaagccgcggcagcccgggtctcgcggtgagtgagacccatcgtccctgtctgtctaggcagcacgcctcgctcgccagtcgccatgtcctcctcctccgcgtctctacagccgcctcccgccggtgcaaccggcggcagctccccctactccgcgtcctcgtccttcctcccctcgttcatgatcatcgccgcgctgctcgcattcgtcttcctcgcctccgtctccatccacctcctgctccgcttcctctccgcccgctcttcctcctcctcctcctcctcctcctcctccccgccgttgtccggacatccgcgcccgcggacctaccgcgacgacgcgggctcggcggacgcatccgtggcgaggcggcctgccgccaccgcggctccagccgacgcagggaagaacgaggaggaggnaggacgcgggcgacgagaagcagcggctgatcgactccctgccgctgttcaccatggmgtcggcgctcgcggcgctccccaagagctcgcccgactgcgccgtctgcctgtcgccgttcacgccygacgccgacctgcgcctgcttcccgcgtgccgccacgcgttccacgccgcctgcgtmgacgcctggctgcgcaccacgccgtcctgcccgctctgccgcgctgccgtcgcgctcccgcacccctcgctctccggcatgctcgccgccgcgcaggcgcagcgccccgcgaggcccggacccggacccggaccgagcttcctcgtcgagatgggcaccgtcagcagccgcggctcgcccgcggcggccggcggcggccgggacaggaacaggaacaggaacagccgcacctactcgctcggctctgccttcgactaccagatcgacgaggaggtggaagccgtggtgtcccgcgtcgcgcgcatcgccgccgcgagagaatccagcgccgtcaaggaggagaagccgtcagccgagcagggatcggcgccagcgccagcgccagcgccgtcgccttcttygcaaccgccgcctcccggcgagacggtggccraggcggcgggctcctcgcgcgggtggctgcgggagtacgtggaccggctggcgtcctcggcctacacgctctcggakcggtggagctcgcgctggagccaggggcagagccagcagcaacggcaggaagagccgtggctgtgggacgcggaggccgcggagatgtcggcggcgccggggtccgacgacgacgaggaggagacggcgttcatggcgatgtaccgctggatcgccggggtcyaaacgtagtcgagtaaggttacagggggtttctgtgtcaaaagtttctagttcaggagttgtgttgagttgaggtgatccaaatgttttggaaccttctgttgattgtgacgactgtgat

SEQ ID NO: 958 - protein, 269 aa, Zea mays
  misc_feature (1)..(269): Ceres CDNA ID no. 23803323
  misc_feature (1)..(269): Also Known As  Ceres SEEDLINE ME12139
  misc_feature (1)..(269): Also Known As  Ceres CLONE ID no. 389639
  misc_feature (15)..(56): Pfam Name: zf-C3HC4 Pfam Description: Zinc finger, C3HC4 type (RING finger)
  misc_feature: Phenotype: Late Flowering Useful for delaying flowering time
  misc_feature: Phenotype: Dark Green Useful for increasing chlorophyll and photosynthetic capacity
  misc_feature: Phenotype: Serrate Margins Useful for making plants with increased biomass and foliage
  misc_feature (2)..(2): Xaa is any aa, unknown, or other
  misc_feature (177)..(177): Xaa is any aa, unknown, or other
  misc_feature (188)..(188): Xaa is any aa, unknown, or other
  misc_feature (213)..(213): Xaa is any aa, unknown, or other
  misc_feature (268)..(268): Xaa is any aa, unknown, or other
MXSALAALPKSSPDCAVCLSPFTPDADLRLLPACRHAFHAACVDAWLRTTPSCPLCRAAVALPHPSLSGMLAAAQAQRPARPGPGPGPSFLVEMGTVSSRGSPAAAGGGRDRNRNRNSRTYSLGSAFDYQIDEEVEAVVSRVARIAAARESSAVKEEKPSAEQGSAPAPAPAPSPSXQPPPPGETVAXAAGSSRGWLREYVDRLASSAYTLSXRWSSRWSQGQSQQQRQEEPWLWDAEAAEMSAAPGSDDDEEETAFMAMYRWIAGVXT

SEQ ID NO: 959 - protein, 269 aa, Zea mays
  misc_feature (1)..(269): Ceres CLONE ID no. 389639
MXSALAALPKSSPDCAVCLSPFTXDADLRLLPACRHAFHAACXDAWLRTTPSCPLCRAAVALPHPSLSGMLAAAQAQRPARPGPGPGPSFLVEMGTVSSRGSPAAAGGGRDRNRNRNSRTYSLGSAFDYQIDEEVEAVVSRVARIAAARESSAVKEEKPSAEQGSAPAPAPAPSPSXQPPPPGETVAXAAGSSRGWLREYVDRLASSAYTLSXRWSSRWSQGQSQQQRQEEPWLWDAEAAEMSAAPGSDDDEEETAFMAMYRWIAGVXT

SEQ ID NO: 960 - DNA, 1554 bp, Arabidopsis thaliana
  misc_feature (1)..(1554): Ceres CDNA ID no. 12574629
  misc_feature (1)..(1554): Also Known As  Ceres SEEDLINE ME04583
atggatgcaatcgtcgttgactctcaaaactgcttcatcatcattcttctatgttccttctcactcatctcctactttgtcttcttcaaaaaaccaaaggttaactttgatttgcttccgagccctccttcacttccaatcattggtcatcttcacctcttgctctctactcttatccacaagtctcttcagaaactctcctccaagtatggacctcttctccatctccgcatctttaacatccccttcatcctcgtctcctcggactcactggcctatgagatcttcagggatcacgacgtgaacgtctcctctcgcggtgttggagcgatcgacgagtccctggcgtatggatcttctggtttcatacaggctccctatggagattactggaaattcatgaagaagctcatcgcaactaagttgctgggaccccaaccactggtgcggtcacaggattttcgttctgaagagctagagaggttctacaaaaggctgttcgataaggccatgaagaaggaaagcgttatgattcataaggaagcgtccagattcgttaacaatagcctttacaagatgtgcacgggaaggagcttttcagtggagaataatgaagtggagagaataatggaacttactgccgacttaggtgccttgtcacagaagtttttcgtgtcaaagatgtttcgtaagctgcttgagaagctcggtatctcacttttcaaaacggagataatggttgtttcacgtagatttagtgagctggttgaaaggattcttattgaatatgaagagaaaatggacgggcatcaaggcacacagtttatggatgccttgttggcagcttatcgagatgaaaatacagaatataaaatcactaggagccatatcaagtcgcttctcacggtaaatgtacatgagtttttcattggagccgctgacgcctcatcaatagcaatacagtgggcaatggcagatatcataaacaaccgtgagattcttgagaaattgagagaagaaattgattcggttgtaggaaaaacaagattggttcaagaaacagatttaccaaaccttccttatttgcaagctgtagttaaggaagggctaagattgcacccgcctacacctctggttgtaagggagttccaagaagggtgtgagattggagggttctttgtaccaaagaacacaacacttattgttaattcttatgctatgatgagagatcctgattcatggcaagatcctgatgagtttaaaccagagaggtttctagcttccttaagtagagaggaggataaaaaagagaaaatccttaacttccttccttttgggagcggaaggagaatgtgtcctggatcaaatcttggttatatatttgtaggaaccgcgattgggatgatggtccagtgctttgactgggaaatcaatggagacaagattaatatggaagaggctactggagggtttctcatcaccatggctcatccccttacatgcactcctattcctcttccccgaacccaaaactctttaatttcccatctttaa

SEQ ID NO: 961 - protein, 517 aa, Arabidopsis thaliana
  misc_feature (1)..(517): Ceres CDNA ID no. 12574629
  misc_feature (1)..(517): Also Known As  Ceres SEEDLINE ME04583
  misc_feature: Phenotype: Late Flowering Useful for delaying flowering time
  misc_feature: Phenotype: ROSETTE LEAVES Useful for making ornamental plants with modified leaves
  misc_feature: Phenotype: Oval Shaped Useful for making plants with increased biomass and foliage
  misc_feature: Phenotype: Short Useful for making shorter plants
MDAIVVDSQNCFIIILLCSFSLISYFVFFKKPKVNFDLLPSPPSLPIIGHLHLLLSTLIHKSLQKLSSKYGPLLHLRIFNIPFILVSSDSLAYEIFRDHDVNVSSRGVGAIDESLAYGSSGFIQAPYGDYWKFMKKLIATKLLGPQPLVRSQDFRSEELERFYKRLFDKAMKKESVMIHKEASRFVNNSLYKMCTGRSFSVENNEVERIMELTADLGALSQKFFVSKMFRKLLEKLGISLFKTEIMVVSRRFSELVERILIEYEEKMDGHQGTQFMDALLAAYRDENTEYKITRSHIKSLLTVNVHEFFIGAADASSIAIQWAMADIINNREILEKLREEIDSVVGKTRLVQETDLPNLPYLQAVVKEGLRLHPPTPLVVREFQEGCEIGGFFVPKNTTLIVNSYAMMRDPDSWQDPDEFKPERFLASLSREEDKKEKILNFLPFGSGRRMCPGSNLGYIFVGTAIGMMVQCFDWEINGDKINMEEATGGFLITMAHPLTCTPIPLPRTQNSLISHL

SEQ ID NO: 962 - DNA, 1213 bp, Arabidopsis thaliana
  misc_feature (1)..(1213): Ceres CDNA ID no. 23513037
  misc_feature (1)..(1213): Also Known As  Ceres SEEDLINE ME11012
attccatttttatttggcttattccttcctccctctacatgatggatacattctcttgtaattcttatgaacaaaaccacccccatgatgatgatattgatattgatgctcatgatcatgattctcatggtggtgatcatcaagaggagagtggatggacaacttatcttgatgatttctcaaatcaatatagaactactcatcatgaagaaaatgatcatcaagacaagagttcttattcacttcttgccacctctacttctctggtctctgacgccgccacccatgccttttccggcaagagttttcccgttaattttccggcgaaactgaagtttgggaggggaagaaccaaaaagatttgtgaggatgattctttggaggacacggctagctctccggtcaacagccctaaggtcagtcactttgaacatattcagacgcctcctagaaaaattgaggactatgtctcttctagtttcgttatggtaatctctctaactctcttttcgatacaaattatttctctctctatcctctttgcaattgaattcattaataattaacccacaagaaaagattgagaagtttctttttgcatagtatattaagattagacttggttgtgtattattgtctattgataactcaatatttctttttttagttataacttataaggaagattcagagatcttctagtatcaacaatgtttacactataatatttgatggatataacacgtaaatatgtttttgaaacggtttacgatagggaaatattagaggcatgggggatcatcaaatccaaatacaagaaggtggtgaacaaaaagtgacgctgatgagaaatctcattgacggaaacaacaacaacaacaacaacaatatggatttgaggagtagaggattatgcgtcgtccctatctccatgttggctaattttaacggtcgctgctgaataatgataatcaattctataaacatccttaattaactatataaacccttgtaaatttggtggtgtttatattcgtacctatcttgtatatatgtacttgatgtgtgtatatatgtacatcttgatgggtatgtgctttacatatatatgtatagctttcgtgtacatatataaaacacatcggtggatatgtgtaaagtacgacgtctatgtttgcaaacattttctaagagctactatatcataaacttt

SEQ ID NO: 963 - protein, 175 aa, Arabidopsis thaliana
  misc_feature (1)..(175): Ceres CDNA ID no. 23513037
  misc_feature (1)..(175): Also Known As  Ceres SEEDLINE ME11012
  misc_feature: Phenotype: Dark Green Useful for increasing chlorophyll and photosynthetic capacity
MMDTFSCNSYEQNHPHDDDIDIDAHDHDSHGGDHQEESGWTTYLDDFSNQYRTTHHEENDHQDKSSYSLLATSTSLVSDAATHAFSGKSFPVNFPAKLKFGRGRTKKICEDDSLEDTASSPVNSPKVSHFEHIQTPPRKIEDYVSSSFVMVISLTLFSIQIISLSILFAIEFINN

SEQ ID NO: 964 - protein, 141 aa, Arabidopsis thaliana
  misc_feature (1)..(141): Ceres CLONE ID no. 251685
  misc_feature (1)..(141)
  Functional Homolog of CDNA ID no. 23513037at SEQ ID no. 963with e-value of 4.1E-68 and percent identity of 92.20
MMDTFSCNSYEQNHPHDDDIDIDAHDHDSHGGDHQEESGWTTYLDDFSNQYRTTHHEENDHQDKSSYSLLATSTSLVSDAATHAFSGKSFPVNFPAKLKFGRGRTKKICEDDSLEDTASSPVNSPKVRYYLTNTINLKPDP

SEQ ID NO: 965 - protein, 211 aa, Arabidopsis thaliana
  misc_feature (1)..(211): Public GI no. 11994638
  misc_feature (1)..(211)
  Functional Homolog of CDNA ID no. 23513037at SEQ ID no. 963with e-value of 1.3E-80 and percent identity of 89.10
MMDTFSCNSYEQNHPHDDDIDIDAHDHDSHGGDHQEESGWTTYLDDFSNQYRTTHHEENDHQDKSSYSLLATSTSLVSDAATHAFSGKSFPVNFPAKLKFGRGRTKKICEDDSLEDTASSPVNSPKVSHFEHIQTPPRKIEDYVSSSFVMGNIRGMGDHQIQIQEGGEQKVTLMRNLIDGNNNNNNNNMDLRSRGLCVVPISMLANFNGRC

What is claimed is:

1. An isolated nucleic acid molecule comprising:
(a) a nucleotide sequence encoding an amino acid sequence that is at least 85% identical to any one of the polypeptides in FIGS. 1-73;
(b) a nucleotide sequence that is complementary to any one of the nucleotide sequences according to paragraph (a);
(c) a nucleotide sequence according to any one of the nucleotide sequences in the Sequence Listing;
(d) a nucleotide sequence that is in reverse order of any one of the nucleotide sequences according to (c) when read in the 5′ to 3′ direction;
(e) a nucleotide sequence that is an interfering RNA to the nucleotide sequence according to paragraph (a);
(f) a nucleotide sequence able to form a hybridized nucleic acid duplex with the nucleic acid according to any one of paragraphs (a)-(d) at a temperature from about 40° C. to about 48° C. below a melting temperature of the hybridized nucleic acid duplex;
(g) a nucleotide sequence encoding any one of the amino acid sequences corresponding to FIGS. 1-73.
(h) a nucleotide sequence encoding any one of the lead, functional homolog or consensus sequences in FIGS. 1-73.

2. A vector, comprising:
a) a first nucleic acid having a regulatory region encoding a plant transcription and/or translation signal; and
a second nucleic acid having a nucleotide sequence according to any one the nucleotide sequences of claim 1, wherein said first and second nucleic acids are operably linked.

3. A method of modulating plant growth and phenotype characteristics, said method comprising introducing into a plant cell an isolated nucleic acid comprising a nucleotide sequence selected from the group consisting of:
(a) a nucleotide sequence encoding an amino acid sequence that is at least 85% identical to any one of the polypeptides in FIGS. 1-73.
(b) a nucleotide sequence that is complementary to any one of the nucleotide sequences according to paragraph (a);
(c) a nucleotide sequence according to any one of the nucleotide sequences in the Sequence Listing
(d) a nucleotide sequence that is in reverse order of any one of the nucleotide sequences according to (c) when read in the 5′ to 3′ direction;
(e) a nucleotide sequence that is an interfering RNA to the nucleotide sequence according to paragraph (a);
(f) a nucleotide sequence able to form a hybridized nucleic acid duplex with the nucleic acid according to any one of paragraphs (a)-(d) at a temperature from about 40° C. to about 48° C. below a melting temperature of the hybridized nucleic acid duplex;
(g) a nucleotide sequence encoding any one of the amino acid sequences in FIGS. 1-73; or
(h) a nucleotide sequence encoding any one of the lead, functional homolog or consensus sequences in FIGS. 1-73, wherein said plant produced from said plant cell has modulated plant growth and phenotype characteristics as compared to the corresponding level in tissue of a control plant that does not comprise said nucleic acid.

4. The method according to claim 3, wherein said consensus sequence comprises one or more of the conserved regions identified in any one of the alignment tables in FIGS. 1-73.

5. The method according to claim 4, wherein said consensus sequence comprises all of the conserved regions identified in any one of the alignment tables in FIGS. 1-73.

6. The method according to claim 5, wherein said consensus sequence comprises all of the conserved regions and in the order identified in any one of the alignment tables in FIGS. 1-73.

7. The method according to claim 6, wherein said conserved regions are separated by one or more amino acid residues.

8. The method according to claim 7, wherein said conserved regions are separated by one or more amino acids consisting in number and kind of the amino acids depicted in the alignment table for the lead and/or functional homolog sequences at the corresponding positions.

9. The method according to claim 8, wherein said consensus sequence has a length in terms of total number of amino acids that is equal to the length identified for a consensus sequence in one of FIGS. 1-73, or equal to a length ranging from the shortest to the longest sequence in any individual alignment table in any one of FIGS. 1-73.

10. The method of claim 3, wherein the modulated plant growth and phenotype characteristics comprise a modulation in plant size, vegetative growth (increased or decreased), organ number, biomass, sterility, seedling lethality, accelerated crop development or harvest, accelerated flowering time, delayed flowering time, delayed senescence, enhanced drought or stress tolerance, increased chlorophyll and photosynthetic capacity, increased anthocyanin content, increased root growth, increased nutrient uptake, increased seed weight, increased seed carbon or nitrogen content, increased seed/fruit yield, modified fruit content, enhanced foliage, making nutratceuticals/pharmaceuticals in plants, increase plant size, lethality, low fiber seeds with increased digestability, ornamental appearance with modified leaves, flowers, color or foliage, sterile plants, enhanced ability to grow in shade, enhanced biotic stress tolerance, increased tolerance to density and low fertilizer, enhanced tolerance to high or low pH, enhanced tolerance to low nitrogen or phosphate, enhanced tolerance to oxidative stress, enhanced chemical composition, altered leaf shape, enhanced abiotic stress tolerance, increased tolerance to cold stress, increased starch content, larger seeds, smaller seeds, fewer or no seeds, shorter plants, enhances plant strength, increased plant height, modified flower length, longer inflorescences, modified seed fiber content, modified fruit shape, modified fruit composition, modified seed yield, modified plant architecture, modified amount or angle of branching, modified leaf structure, modified seed structure or content, and enhanced shade avoidance as compared to the corresponding characteristic of a control plant that does not comprise said nucleic acid.

11. The method of claim 3, wherein said isolated nucleic acid is operably linked to a regulatory region.

12. The method of claim 11, wherein said regulatory region is a promoter selected from the group consisting of YP0092 (SEQ ID NO: **), PT0676 (SEQ ID NO: **), PT0708 (SEQ ID NO: **), PT0613 (SEQ ID NO: **), PT0672 (SEQ ID NO: **), PT0678 (SEQ ID NO: **), PT0688 (SEQ ID NO: **), PT0837 (SEQ ID NO: **), the napin promoter, the Arcelin-5 promoter, the phaseolin gene promoter, the soybean trypsin inhibitor promoter, the ACP promoter, the stearoyl-ACP desaturase gene, the soybean α′ subunit of β-conglycinin promoter, the oleosin promoter, the 15 kD zein promoter, the 16 kD zein promoter, the 19 kD zein promoter, the 22 kD zein promoter, the 27 kD zein promoter, the Osgt-1 promoter, the beta-amylase gene promoter, the barley hordein gene promoter, p326 (SEQ ID NO: **), YP0144 (SEQ ID NO: **), YP0190 (SEQ ID NO: **), p13879 (SEQ ID NO: **), YP0050 (SEQ ID NO: **), p32449 (SEQ ID NO: **), 21876 (SEQ ID NO: **), YP0158 (SEQ ID NO: **), YP0214 (SEQ ID NO: **), YP0380 (SEQ ID NO: **), PT0848 (SEQ ID NO: **), and PTO633 (SEQ ID NO: **), the cauliflower mosaic virus (CaMV) ³⁵S promoter, the mannopine synthase (MAS) promoter, the 1′ or 2′ promoters derived from T-DNA of Agrobacterium tumefaciens, the figwort mosaic virus 34S promoter, actin promoters such as the rice actin promoter, ubiquitin promoters such as the maize ubiquitin-1 promoter, ribulose-1,5-bisphosphate carboxylase (RbcS) promoters such as the RbcS promoter from eastern larch (Larix laricina), the pine cab6 promoter, the Cab-1 gene promoter from wheat , the CAB-1 promoter from spinach, the cab1R promoter from rice, the pyruvate orthophosphate dikinase (PPDK) promoter from corn, the tobacco Lhcb1*2 promoter, the Arabidopsis thaliana SUC2 sucrose-H+ symporter promoter, and thylakoid membrane protein promoters from spinach (psaD, psaF, psaE, PC, FNR, atpC, atpD, cab, rbcS, PT0535 (SEQ ID NO:), PT0668 (SEQ ID NO:), PT0886 (SEQ ID NO:), PR0924 (SEQ ID NO:), YP0144 (SEQ ID NO:), YP0380 (SEQ ID NO:) and PT0585 (SEQ ID NO:),

13. A plant cell comprising an isolated nucleic acid comprising a nucleotide sequence selected from the group consisting of:
(a) a nucleotide sequence encoding an amino acid sequence that is at least 85% identical to any one of the polypeptides in FIGS. 1-73.
(b) a nucleotide sequence that is complementary to any one of the nucleotide sequences according to paragraph (a);
(c) a nucleotide sequence according to any one of the nucleotide sequences in the Sequence Listing;
(d) a nucleotide sequence that is in reverse order of any one of the nucleotide sequences according to (c) when read in the 5′ to 3′ direction;
(e) a nucleotide sequence that is an interfering RNA to the nucleotide sequence according to paragraph (a);
(f) a nucleotide sequence able to form a hybridized nucleic acid duplex with the nucleic acid according to any one of paragraphs (a)-(d) at a temperature from about 40° C. to about 48° C. below a melting temperature of the hybridized nucleic acid duplex;
(g) a nucleotide sequence encoding any one of the amino acid sequences in FIGS. 1-73, or
(g) a nucleotide sequence encoding any one of the lead, functional homolog or consensus sequences in FIGS. 1-73.

14. A transgenic plant comprising the plant cell of claim 13.

15. Progeny of the plant of claim 14, wherein said progeny has modulated plant size, modulated vegetative growth, modulated plant architecture, modulated biomass, modulated sterility or modulated seedling lethality as compared to the corresponding level in tissue of a control plant that does not comprise said nucleic acid.

16. Seed from a transgenic plant according to claim 14.

17. Vegetative tissue from a transgenic plant according to claim 14.

18. A food product comprising vegetative tissue from a transgenic plant according to claim 14.

19. A feed product comprising vegetative tissue from a transgenic plant according to claim 14.

20. A method for detecting a nucleic acid in a sample, comprising:
providing an isolated nucleic acid according to claim 1;
contacting said isolated nucleic acid with a sample under conditions that permit a comparison of the nucleotide sequence of the isolated nucleic acid with a nucleotide sequence of nucleic acid in the sample; and
analyzing the comparison.

21. A method for promoting increased biomass in a plant, comprising:
(a) transforming a plant with a nucleic acid molecule comprising a nucleotide sequence encoding any one of the lead, functional homolog or consensus sequences in any one of FIGS. 1-73; and
(b) expressing said nucleotide sequence in said transformed plant, whereby said transformed plant has an increased biomass as compared to a plant that has not been transformed with said nucleotide sequence.

22. A method for modulating the biomass of a plant, said method comprising altering the level of expression in said plant of a nucleic acid molecule according to claim 1.
